United States Patent Application Publication US 2024/0398875 A1 - sequence listing, part 2

SEQ ID NO: 11 - DNA, 4929777 bp, Rouxiella (residues 1,643,260-3,286,518 of 4,929,777)
ggcatgctgtcgcacggccagaaacagtttctggaaatcggcatgctgttggtacaggaaccgcatctgctgctgctcgacgagcctgccgccggcatgactgacgccgaaaccgagtacaccgccgagctgttcaagtcgctcgccggtaagcattcactgatggtggtcgagcacgatatgggatttgtagaaaccattgccgaccacgttaccgtgctgcatcaggggcaagtgctggcggaagggtcgctgcaggaagtgcaggctaacgagcaggttatcgaagtttatctgggccgctaagctgcgccgcagggagtgaatcatgttgcaagtcaatgagctaaaccagttttacggcggtagccatatcttacgcggactgtctttcgaggcgaaaataggtgaggtcacctgcctgttaggccgcaatggggtcggcaaaacgacgctgctgaagtgcctgatgggactgattccggcgaaatccggcaccattagctggaacggcacggttatcaatggccgcaagccgcaccagcgggtgcagtcgggcattgcctacgtcccgcagggacgcgaaatttttcctcgtttaacagtagaagaaaatttactgatgggcctgtcgcgcttttcgggcagtgaggccaaaacggtcccagatgaaatttatcacctgtttcccgtactactggaaatgaaaaatcgccgcggaggtgacctctccggcggacagcagcagcagttggccatcggtcgcgcgctggcgtgcaggcccagcctgcttatcctcgatgagccgacagaaggtattcagccctcggttattaaagagataggcgccgttatccgccagcttgctgccagaggcgacatggcaatattgctagtcgagcaattttatgattttgcggcagagctggccgacagctatctggtgatgtcgcgcggtaacatcataaaacgcggacagggcagtgagatggaggccgaaggggtaagagggctggtggcaatttaagaaaataacggtgacaaaaaagccgcgacagtgcgcggctttttcaaaacacgtgttgcgattacgaccttatcttacggtagatgaacaggacaacgatcgcaccgataacggcgaccacgaagctaccaaagttaaagccgtctacacgaccaaagccgaagaaggtactgatgtaccccccacaaccgcacctacaatccccagaatcacggtcagaataaagccgccaccgtctttacctggcatgatccacttagccagaatacctgcaatcagaccaaaaataacccaggataaaatacccatttcgacgtctcctaatacgttggtgttaccgtgaaatttgttcagccaatcaggccaaaccaatgtagaaaattcccttcctacgaatcagttcgtcgcttagcgctgcgaaccttttttctgttactcgatatctattttagcagattaaaacaaactcgctcaaaatcagccacaaggacggaatctgcgcgcattgtgcgtccaacgtaaaccgccttctcgggatgtaaagctctgccgggttaaacgtaaaaacgcgtaaatgttgaacagtatttttgaatgacttcctcaaatcaatccgtttttcatcctcactcaatcggcctattatttgctcatcgaaaggcaatcacctttcaaactcatattaccgattaggaatgacattatgaaaagcatcaaatattttgcagtagccgcggccctttctttcgcttctttcgccacctttgctgcacaagaagtctctcaacctgctgacggggcgcaaaaaatcggcgttgtaaccgccagcggcgcaaccaccctggactctttaaacaacgatttggccaatcaggcgaaacaagcgggtgccagttcttaccgcatcacttcagtgaccggtaacaacctgatgagcgcaagtgcagttctgtacaaataatcgttacaccaacgacgttttatccgcaaaaagccgatgagatcgccttaaaaggagatttcatcggctttttgcttttctattgcatgccccgtcgctgataaatatgctgtctctttccagtcgaaggaacagcccatgacactgaccgattctctcgtttcctatacctttgccatcaccctgctgacgctgacgcccggtctcgataccgcgctgattcttcgtaccgccgccagcgaaggcagtaagaaagcctttcaagccgcaatgggggtgaacgccgggtgtatgatatggggtgcgatcgtggcgctgggtctgggtgcgttgcttaccgcctcggaactggcgtttaacgtacttaaatgggtcggagcggcgtatctctgctggctggggctgcaaatgctgttcaaaccccgtaatcagatggcggcagaatccgccgccgatgctccgctgaaaaagagcagcaacgggttcattaaagggttgttcggcaacgtgctgaatccgaaggttggcgttttttacgtgacctttctgccgcagtttgtcgccagcggttatcccgttgccgcctacacctttggcctggcgatgatccacgtcttgattggtacagtctggtcttcgacgatgattgcagccactcgtccgctttcgcgctggttaaaacgccctgcggtggttcgtaacatggaccgcctgactgggctggtgtttgtcgcctttgctgtgcgtctggcgaccagcaagcgctaaattttgtagaaaaattattgataacaagagaatgaaaatgaccatcaaaacacgaatcacggccaccccctcttttgacgacgtcgaggcggtcaaaaatggtcttcgtgaatacaataaaaattatattccagagcaatctttcaaagagctggcggtattcgtcgaagacgatgccggtaataaaacggcgggactgatagctgaaaccgtaggtaagtatctgatgattaaatatctgtgggtggccgaatctttgcgtggacaagactgcggcacgctgctgattcgacaggctgaagaacaggctattgcccgcggctgtcgctacgccttggttgataccttcagttttcaggcgcgcccgttctacgaatgcctgggctatgagtgcaagatgacgcttgaagattacatcgaagatacgcgtgctgaaaaaggggttgaagcctcacatcagcgcttctatctttccaaaagactgggctaaacggcaggtagcccgaaagtatcgggctacctttccattatcgcgcagacagagcaagccactcttttacagaatctcgatcccactggcgctgaacgtaatcgaccagcttttcaggcactttatcgccgttcaaatacagacgattaagcatcaatgccaggtcagtatcggcaatacaccattcaccaaacagattattacgctcacccagcaggcgcagcgcagcgtcatacagcttcgccgccgccacttcacccgcaggcgttaacggtggacgatgctggccaccaaaaacaatctcggttgaacgctcttcgcggataggcatcagatcgctgcgcagccaggcctgaatttcacgtgctttggcgcgatcttcctggttttcagggtaaatagccgggaaagtcggtgccggaaacagctcttcaatatactcgtcaattgccgaagactcggacagctgaaaattgccgttcgacagggtcggtacacggcgtgtcgtcgaaatcgccgaataattttcttttagattttctgcctgcgccaaatctaccgtttcaatctcaaacgggatgcctttttctgtcaatgcgacgaatgcagacatcacatacggactataataattagcatcggaatatagcgttaacttcggttcactcattttaccccctgatagcgaattctcgtttattccctgttctgatctctgaaacatagcctaatctgtaagcaatgactatgagttaactcaataatttcccggcaggaggctcgatgaagagatttgctctggtatgggtattgctgcttcccgcgctgtattcgacgccgtcattggcatcgtcggcgaaagaaataaaagaaaaattcagccatatgcagattggcgacagaacgttatgcctgagcgatattatctatcccaatgaacagccgatgaaggtgattgaaaacggctttttagtacagaaatcccacgacgaactggtctatcaaacggtgctgatttatctgctcggcaacgacgtgacggtcaacatccacgccttgattgtgagccgtctggagaaaacctctttctctaacgaatttagggacacctttattcaggtaaccggcctcgaccagccaaatcaggcgattgccaaggccaatattatgaaaagttatcaggaatcagtgttgaatcaggtgaatcgcgtgccctacagcgccgttattcttaacgacaaaggctacgagattagtcagcaggaagacgaagtgagtgaattaagcacctgctatatcaccccgattaaaagcgtcgattaacggcaatatttaataaagtcggtcaatacgcccacgcggtcatacaattttctggcggtgtggttagcactctgcgtggtccaatagacgttggctttattgttgcgatcggcatagtcatagaccgcctcaatgagtgcctgtccgacgcccatcttacgcgcggccggtgagacgtagagatcctgcaaataggtcacctgctcgagcgaccagccgtggtcatgattgatacagttggctattcctaccaactttccttcatgctcagcgacatagccaaacatcgcctcatagctttcttcggaaagccgtgtaaacgtgcgctcaaaaacgtcttgattgagggtactctggtaaaaatccagatattcgcgccatagcgcttcccattgctctctgtcggcagggaccagcggacgaatgatcggtttatcgatagtgctcatctcttttccttattcagattaacgccaccagagtgaatttaaattcacaaaatatgaataaattagcatatttattttaaatcactcgactgcccattgatattctcacacaaataatgctctataacggactaaaaataagacgctatcgctaatccggctcaaaagcacagccagcaaacacaaggtctgtcgagaatgttatttaaaaatcgtctgcaagattggtcattttccgccgtgatcgccggatttgtcgccgtactggtgggttataccagctcagcggcgattgtttttcaggccgccgaggccgcaggagccaatctcgcgcaaataggcagctggtttaccatgctcggtttcggcatgggcgttaccggcatcgcgctctcactgtattaccgtacgccgattgtcaccgcctggtcgacaccgggcgcggcgctgctggtcaccagcttacccggcacgtcgctcaatgacgcgatcggtgtatttgtttttgccagcggcctgattttactgagcggcgtcaccggtttattcgccaaaatgatgcgctatataccgcaggcgctctcagccgcgatgctggcgggtatcttgctgcgatttgggctcgatgcctttgtttccctacagaccaacctgctgctggcgggcggcatgtgcctgacgtatctgattgcacgacgcctgatagcccgctactcggttattctttcgctgtgcgttgggttagcgatcgccgcctggcaggggatatcgccttccacggtcaggcagtacacttcgccgcgcctgaatttatcatgccgcatttctcctgggagaagctggttggcatcggtctgccgtttttcgtggtctcgatggcctctcaaaacgcgcccggcatcgccaccctgcatgcctctgggtttaaagtaccggtctcgccgctgattaccgttaccgcgctgctggcgctgattcttgccccgttcggtgtctactctattggtattgcggccattacggcggccatctgcatgggcaaagacgtgcatcccgaccccaacaagcgctataccgccgccgttgccgccggcgtgttttatctgctggctggcgtaatgggcggttcaatcggtacgctgttcaccgcgctgcctgcgccgctgattcatactgtcgccggtctggcgctgcttggcaccatttctggcagcctctatcgcgcattaacagaagaaaagcagcgcgacgcggccatcgtgaccttcctcattactgcatcaggtattcaactgtttggcgttggctccgccttctggggtctaataggaggggtactgacccacggtatcctcagcctgcctgaaaaaaatcaagaaaaaatcagtaatccgcgttcttaaattgtaatcagggcctcaaaaagttgaggcccttcatgttatgagtaacaggattaggtaacacgcattttagtgacggtgatcacattttaccccccgtaaagtctctttactgattcaataattagccagataaagagcaataatcacatgaagatcgaaacgaaatcttgcgtagtcaccgggaaaaaagacgtcgccgtcgttaatcagcagctggattatcaggggtcggtacgctggtcaaagtcacgagaggcgggatttgcggctcagacctgcattactatgaacacggtgccgtgggcgattttaaagtccgcgaagcgatggtgcttggccatgaagtggtcggtgtcgttgagcaatcagacagcgcagcactcaagccgggccaaaaagtcgcacttaatccgagtaagccgtgcaaaacctgtaaatactgcctggccggtgaagaaaatcagtgcacaacaatgaagttcttcggcagcgcgatgtatttcccacacatcaacggcgccttcacgcagtataaaatcgtcgacaatgcccagtgtattccctatgacaacagcgtgagcgacaggctgatggtatttgccgagccactggctgtggctattcacgcggtaaatcaggccggtgacgtaaagggtaagacggtattcgtctcaggcgtgggtccgataggtagccttatcgcggcggccgccaaggccaaaggtgctgccgaagtggtctgcaccgacctcagtgagcgttgtctggaaattgtcaccgcgatgggtgccaccaaaacgctgcatgccgcgagcggtgacttctcgccttacctggagcagaaaggctattttgatatttcattcgatgcctctggccatcactcctctattcgccgctgtctggaagtgacgcgcgccaagggtacgctggtgcaagtgggcatgggcggcgccatccctgatttcccaatgatgatgctgatagccaaagagattaaatgggtcggcagcttccgctttaccgaagagttcgtgactgccgtcgagtggctggcaaacaaggttatcgatccgatgccgctgctgtcgggcgagtatccgcaggacgagctgaccaccgcactcgaatttgcagctgataaaaccaaggccgcgaaagtgcagctggtgttctaacgtcccgcacagacaccctcatgtccgtttttggccttcctcacctttcgaacagcgcgcaatatggcgttataccgaaaagaggagggccgaaaatgtctcacagtgcattactgatcgtcgacgtacagcgttctttcgaacaaaaagatttctggcaacaggaagatttccccgccttcaggcaggcgcttacgcgtctcattgacggctgtcagagccgcaacgtgccgttggttgatatttttcacgtcagtcagggacctttcgccctcgagtctggattcgtcacaccaatgtctttcctcagtcatgagcctgaagtgcgcatctataaacacgtgcacaatgcgcttaccgagtcgggcctggatgtctggctgcgcgatcgtcagataaatcatcttgttatcagtggaatgcgcaccgagcagtgctgcgagaccaccgcgcgcgtcgcctcggatctggggtttgacgtgaccttcgtgactgaggccacgctgaccttcccgatgacgcattcttcaggcctgacgctgagcagcgatgagattaagctccgtaccgaactggtgctaaccgaccgttttgctcacgtgaccaacgttgacggtgcgttaaacgagcttgataatcgcgcagagtcgaccgtgacgacctcttccgacgtcagttggcagccgaaaccctatctcggccgtcgcattgcgccgctgcccgtctggcatcatgaaggctggcagctcaagcgctactccattgaatttgcagggacaacctcgcccgccgacatttttgaacgcgcctacacccgcgtcgccagctggcttccgccgcaggccaccaccgccgatcgtccgggcgtgggctggatgctggaacatcgcggtaaaaccatggattatctggtggtcggttggtgggacaacgaaaacgagctacgaatgaaaatttgggtgaccgaaaacggccaatggcgtgaggctttaaacgaatcgttctgcgtctgggatatgcaagtcatggcctttgagcgcgatgcgtttgtcgcaacgttgctgcagaagcagccggacgtcgccgcctatttgcaacagcagttaacgattaatctggagtgatatgcagcgcgatgttttctttgtgacactgcccggcgcattggcgctggaccttaccggtccggcagaaaccctgcgcctgagcggccagttcagactgcattacattagcccactgcaagaggttgaactcaccaccgggctggtggtgagtcgcctgaaacccctgccagacgatatgccggatggcagcatcctcgtcgttcccggcgtcagcaactcgcagacacagtttgatacgcccccgcacaggccgttcgtgactggttaaagacccaaaaaaccgcgattgaaggcgcgagattgcagctggtctgcatctgttcagggagtttactggcgggtatggctggcttgctcgacggatatcaatgtacctcgcatcatgaggttatccctcgacttcgtcagcaggttcccgccgcattagtgaaagataatcgcatttttgttgaagatcgcagcatattgaccagtgcaggtatcaccgcaggcatcgatctggcgctgtatcttatcacccgtcatcacgggccacaggccgcgttggacgtcgcccgtgagatggtggtctattttcgccgcggcggtgaagacccgcagctttcaccctggctacagcaccgcaaccatctgcatccagcgattcatcgggcacaaaacgtaatttctgccgatccggaatctgcctggcaggtagaggacgtagcggcaaaggcgcatattagcagcaggcacctcacccgactgttccgccaatatctgggcattagcgtgcgcgactaccacgaacagctgcgcatcgcggtcgccagacagcgcatgcagcaggggtttgggctggaaaaggccgcgctcgccgccggattttcttcaggacggcagcttcgtcgcgccctgcagcgctggcagcagagttaggttcagcttacccagcgtcggccgtcgacgcgttgcaacaacaaccccagcagcaggccaccgcctaaaccacaggcgaaaagataaagcatgttgagcagcgggaactgtggaaaatcaagatgcttgccgcgtaggccgataatgaccagcgcgtgaaaaccataaatggccagtgagtggcgtgaaatcatcgccatcaccgacgacgacaccgttgccagcacctgcttgccccagacaaacagcgacaacgccgcgataaacaccagtggaccgcaatagacatagtaagtctcagcaaaattttggttatgggtcgactgcgcctgcgtgccaagggcaatcaaggcgcagcttgccagaaacatgcctcctgccacccaaccctgccaacgcttatccatttccagcgtcgccagtgcgcgtcccaaaagcgcatacagcagataataaaaggcatcgccggtgatatagagattcagcggaagcaggtgaaaaccgcccagattaaatgcaggtagctgaggattagccagcacaccggccacaaccgcggtaatcaacagcataggcaagggcacctttttgacctgaataaagggcgaaagcaggtatatcagccctattgcgtagaaaaaccaaagatgaaaaaacaccggcttctgcaggatatgggcgaatgagggccaaaaacctatttttgtcataatctggatgtagagtaacgacaccgcgctataaaaaagcaggcaaagaccgatgcgtaaaaaatggcgtggctttgcgctcttctcgccccagaacagcgcaccggaaatcatgaaaaatatcggcaccgacgcgcgagacagggagtctagtgcattggaaaaccaccaggcgggggtatcgattgcgctgaaattaacgacttgaaagctggtagcgtgaataatcaccaccatgacacaggccagtgcacggagattatcaatccagactattttttggctcatctcaggctctttccttaattatttttaactttatgcctgtttatggcagcttaatcgactatttattatctatcgcactaaacaatcactctcagattgtgctaatcggcggaaagatcgttgccatttgctcaaataatcggcagaatgtccgcaattactgactccgcttgcgctattccgcccggaacgtccctttttgctgctaataatcagtaaattagcaccctttttgtgaacttattatgcataacactccgaatactgcgtccctcttgggtcggcaggcactgctttttcctctgtgcctggtactgtttgagtttgcgacttatatcgccaacgatatgattcagcccggcatgctggccgttgtggctaacttcaatgccagcgaagactgggtgccgacctcaatgaccgcctacctcgcaggcggcatgttcctgcaatggctgcttgggccactgtcagaccgccgtgggcgtcgtccggtgatgctggccggagtcggattctttgtgctgagctgtctggctatcttgtttgcccaaaccatagaacaatttatggttatccgcttcttccaggggataagcctgtgctttatcggcgcggttggctacgccacgattcaggagtcttttgaagagtcggtctgtattcgcattactgcgctgatggcgaatgtggcactcgccgccccgctgcttggccccctggccggagcggcgatgattcaatatgcgccctggcagctgatgttcgtgatttttgccgtgctggcgagtatcgcgttttggggcctgcacaaggcaatgcccgaaaccgcatcacgcattggcgagaaactgtcggtaaaaggcctgctgcacgattacaaaatcgtgctgaaaaaccgtcctttcctgtgtggcgcactggcgattggctttgccagcctgcctttactggcgtggattgcgcagtctccggtgatccttatcagcggtgaggggctgtccgcgcttgagtatggcgtgcttcaggttcccgtctttggcgcactgattattggcaacatcacgctcgcgaagctgaccggcaaacgcagcgttgagcagcttatcaagctgggtgccgtcccgatggttgccggcctgtttatcgcggcgattgtgacgtttttatccggccatgcctacctgtggatgaccgccgggctaagcctttatgccttcggtatcggcatcgctaacgccggtttatatcgcctgacgctgttctcgagcgacatgagcaaaggcacggtttctgcagccatgggatgatcagtatgatggtcttcaccttaggcattgagttggcgaaagtggcctacctcagcggtggcagcggattatttaatatcttcaacctgataagcggcctgctgtggctttcactggtggcggtattcatccgtaaacgccgcccggtggttaacggcgctgcggtctaagcagtgatgagtccggccttcccccacttcaacgcgtgggggaaggaagacattcaaggcggggtggttctggcaaaactctcgcgctgaaacagccgctcgaccagcttgatgagcgttgggcgctcaacgcaccagccgggcgcaatgcgccgaaaattgaggtatccgagcatgcaggcaacgctgatatcggcgacgttgagactttccccatttaagagatgacgctgactggcgtatttttccaactgatccaacccacgcagtatcttgccacgctggcgaataatccactcttcgctacgctgcgccgcctcacgccggttttccaatactaacgccaccgcggcatcggtcaccccgtcggccagcgcctcgatttgtttcaccctcagcgcctctaaaggctccgggggcagtaaagtcggtgaagcgccaagcagctcgatgtattgcacgataatgggtgagtcataaaacacctcaccttcctcggtcaccagcgcgggaactttccctaaaggattgaaattcgtcaccttactgcctgcactggtcggaggatcgtttacaaactcaaacgaaatacctttctcaatcagcatcaccgaaattttacgcacataaggactggtatagctgccgatcaacttcattaaaccctccttattcaagttcggggaaagccgaaaaatagccatccatcttttataaaattagcagccgggccgctttttaccagcaataggcacagattgagattcaatttttcagccgttaggactaccctaatgcgtagtcggaatccttcataaatctatcggaaattaccttgaataacctcaccaaacaggcctcatcagtagcggaaactcaggttggcgtgcagcagcgtcaggtaattcaacgtcgcaatctggccgatagtcagcccgactggctggctgaagaggttccggttgcgctggtttataacggtatttcacacgtagtgatgatggcatcgccgaaagatctcgaagcctttgccgtgggtttctctctctcggaagggattattgattcagcgcgtgatatttatggcctcgacgtgacacgaaactgtcatggtattgaggtcaatatagagctgtcgagccgccgtttttctggactcaaagaacgacgccgggcgatggcgggcagaaccggctgtggcgtttgcggcatcgagcaacttgatgacctgttccgtccgctggcgccgctgccgtttacgcagactttttcgctcagcaatctggacactgcactggcgcagctaaattcgatacagcccgttggccagttgaccggctgcacccacgccgcagcctggataaccccagagggtgaactgctcggcggctgtgaggacgtaggccgtcacgttgcgctggataaaatgttgggcatcaaggcgcgtgaaacctcttggcagtgcggtgcggcgttggtgtcgagccgtgcaagttatgaaatggtgcaaaagaccgcgatgtgcggcattgaaattttgttcgccgtgtcggccgcgacctcgctggcggtagacgtcgccgagcgctgtaatcttacgctggtaggcttcagtaaaccggggcgcgccacggtatatagccatccgcagcgactggttgtgtagtaaagcagccgtcgattgatagcattacaagcagcagggttaatgtgccaccttattgctgttaggttaacggcctggtcttagactaatttccctgttagttagataatcttgctctaagccacggataacgcgggctgtgtaatacccacacaaagtgcggagcatagataatcattttcaatatcaatttattaactataatgatcccactgattacgcggtgctcatactactctgcactgcccaacaaaaatggagctgatgaacatgagttattcactaccatccctgccttacgcgtacgacgcacttgagccgcatttcgacaaagaaacgatggaaatccatcacactaaacaccaccagacttatgtaaacaacgctaacgcagcgttggaaagcctgccagaactggcaaagctgccggttgaagagctgctgctgaactttgataaagtaccagctgacaagaaaacggttctgcgtaacaacgcaggcggccacgctaaccacagcttcttctggaaaggcctgaaaaagggcaccaccctgcagggcgaactgaaagccgctatcgaacgtgacttcggcagcgttgacgctttcaaagaagcctttgagaaagctgcagcaacccgtttcggttctggctgggcttggctggttaagaaagacggcaaactggctgtagtttctactgctaaccaggacagcccactgttaggcgaagcaatctctggcgcatcaggtactccaatcgtgggtctggacgtttgggaacacgcttactatctgaaatatcagaacaaacgccctgactacatcaaagcattctgggatgtggttaactgggacgtagccgctgagaacttcgcagccgctaaataagccttcttttccgggttttagaatccggaaaaaagccataaaaaaaccgacgaagcttgcttcgtcggttttttttaagcttaaaaaggtcgaatatcaaaactcttttttagcgaagcctgtcactgttttcaaacccatctcacggcccaacgccgtcatcgggtgaaccaccacgataccgcgaacggctttcttcagcgtgcccatatcggcctgctctttcttggtgatttcacgacggaacggcagttgtgccagcttctgcgcttcagcgctcagcttgacctctttaacgctacgcagacgctcgatttcagccgccagcttctctttttctttcatgtgctggtcgatcagctcggtcacgccttgctgaataacggtcgcatctttgtgattcagtgcatcgagcatatcgctcagacgtttaatctctgctttttctttttcgatcatttcgctaacccgtatgccatcaggcgccgcgagattgcggggcaggacgactaaaaattgaattcaacctctagtgtaacaggaagttgtctattcagcagcctgtgtaacgatgccgggcggtaatccacttatctcacaggctcgccgccctacccgtgccagcgcgtcggtatagcgcgcatcaaacggataacagcatgacaaacgcagcgcgttgcgatagcgcccactcggtgagtacagtgtgccgggcgtgaggcagattttctccatcagcaggaggtcaaaaagcttcaccgtatcaacggcgggggtaaatcaacccaaaaaacgaacccacctttcggctgtgtcgcccgcgtgccctgtgggaaataacgcataatcagtgatttcgcctcatcgatttgtgcggcatagcgccttctcaagcttctaagatgatggtcaaaaccgccagactctaaaaataccgccaacgtttccgacagcaacaccgactcagacatagaagacaccgccttgagctgacgcagtttttcgccaaagcgtccgccggctatccagccaatacgaaaatcaggcgccagcgttttggtaaagctggtgcaaaaaagcacccagccgtttttatcaaacgatttcaccgccggagagagcgttgcgccgaactgaatttcggcgtaaagcccgtcttcaatcagcggcacctgatagtcattcatcaggcgtgccagacgttttttggcagccaacggcatggtgaaacccatcggattttgcgcagtcggcatagcaatcaccgcattaagccgcttctcgctcagcatcagctccagcgcgtcgagagacaatccatcctgcggatcggtcggaatttctaccgccttcaatcccaaactggccagcagcggcagcaggaaaaaataggtcggtgtttccagcccgacgctatcgccaggctgggtagtgacgcggagtgcgagctgcagcgcctccatgcagccgtgggtcagggtgatatcgttcggttcgaggatcatgccgagcgccatcgcgcgacgggcaacctgctggcgcaaatgcagacttcccggcggcagcgcatattggctgattatttttggttggcgacgcagcagcgatgacataatgcgtcccagttttccgccaggataaaaatcactggtctgcgggcaggccaaagaaatgttggtgtattcggggttagtctgcgcagcgaatactttatcgatcagcgccagcacttcatcggccggttcggcggcgggagaatgctcttctatccggctttcgagcaccggcagcgcgctgctaacataaaatcccgactgcggacgcgcctcgataagccctcggtcttccagacggcgataggcagcaaccaccgtgttaatgctgacctgatgcatctgagagcagcgcctcaccgaaggcagtcggctgccgggcaggagcgtaccgcggcgaatggcttcggccatttggtcggcgagctggtgatatcgggtctctcccgccgcctcgtcggtggcgacagagagcagagttgcgggcatgaattcggccatggtgtcagttcccgtcaaatagatggatacagttcatattttaacccactgtaaccataacaatagctgatatctggttctgtaaccagcgcatttaacgtcctatgctaatcactcattggttctaccgccgcagagcgcattaacataaggaacgcccgatgctggatactgcttttatgagttacgtgaccgtgatgtctattacaccgggccctaataatctgctgctcgcctcgtctggcgtaaacttcggactgcgtaaaacgctgccgatgacgttcggtattacgctgggctgcgcgctacagtgcgcggtactgacgtctttgctggccgttatattgagctggatgacggtaatccgcctgccaatggcagtgatcggctgtgcctatcttttctggctatcctggaagatttttcgctcctctacgccgcagaacagggccgaagatcgcccaatgcgcctgataaacggcgcgctttttcagataattaatccaaaagcctggctgatggcaaccaacgtggccatcctgtttacaccgccaggaggcagtatgctgcatcacacgctggcgaacagtataggttttgcaatactcaatttgccctgcgtgttgatctgggcgctgatgggcgacaggctacgtctggcgttacaggttgaatggaaacttaaggcgtttaatacgctgatggcagggttaatggcgttgacggcgctgtggttactgttcgatgagctaaaaaacgcttttattcattgaatgcgctggattttattaaagctttataaagggattattgtcaggttatgatttgtaacctgacaaagcgtgacgagataaaaatggtaaaggcatattttctgatagggtttgggtttcttttcgcattattcggctatttatcgttggatatattagtcgcccaatatctcggaaaccatcccgctatgataaccgacgccaccgcgtttattttactccctgtgacgatagccgttgagtatgccgcctactttcttttgtcccattattttttgggcatgataaaaccgctgtgtttcaaaaaagagagtattttccaggttgtgctgctgatccttaatgcccttttcctttatctcttcgtcacgatggaaacgcatcgtttccagaattccgtcagcagcgatgtggcgatttccgttaacgacttcccttcttcgaaaatctattttacgtcgatggcaatctcgctggttttagtgcttgccgtgaggaaattctggcgcaaaaaggcttaattaacgcttaaccggcgaaaggcgggagggctgctgattgctgatatgggcaatcagcccggtgagcgaaaggaccatggttgagcgaacaatctgctgataacgctgacgctgcatcgctatcatcgactcgtcggcctcgccgggcttcaggaacgtaggtgccggaggcagagaggcgacgcagtgcagctcgccaaagggaccaagaatttcgtcatcggtaaaacggtattcgttgccgtcgtagttgagttcttcacgcagagccataagcagctcggcatcttcatattcgttgcgactgattacgccaagcgcataaaccagcttaaggcgcactgacaaatctcccagcggcccgctgccggaaagtaaaggctctacggcatatttcaccgcatagtcatctttgcgaaagacctgaaccaccagaatatccagtgcttcagccaacagctctaccgctgtcatcagaaaagtgcgcacggttttgcccgcattcagcttttccaatacccggttctcgaacgcctgtgctttttccatggtcgctatcacgatgttaagtgagtctttcaacgcccacggcgtcttccctgattgaggcaggtcgggcgatttacgcccgacacctctttcttcacctggtgttgggatacccttcagtggctgaatccgctccagtaacttggggtttagaaagattcaatgctcccttaatgcattttctcataggcgctgacggcctcagccaccacgtcgctctcagccggcaggccagaaatttgtgccaatgtggctttgggtcccagtgtgtcaagcagttcaaccagttccagcgcctgcgggtcttgttcgctgcgatagcgcatagcagcggcaatgccgataatcagattggcgtgcggcaggccatattcctgagtgcccagcagcggcttgattaaacgatcgcccgcgctaagtttgcgcagaggctgacgaccaacgcgctcgacgtcgtcctgtaggtaagggttttcaaagcgagaaagaattttcttgatgtaagccgcgtgcttttctgcgtcaaaaccgtagcgtttgatcaacactgcgccgctctcttccatcgcgcctttcaccacatcacgcactgtagagtcgagaatggcatcacggatggtcgcatggccggcctgctgacccaggtaggcggtgatcgcgtggccggtgttcagcgtgaagagtttacgctcgacgaaggccatcaggttgtcggtcagctccatccctttaatgtctggcagcggccccttgaactgggtctcatcgacaatccattcgctgaaggtttcaaccgtcacttcgagcgggtcggaagagcctgcggctgccggagggacgatgcggtcaacggcggaatctacgaaaccgacgtgagcttcaacccaggctttttcatcttctggcaatgcgttgaagacgtgctgtttaaactggctggtgccgcgcaccatattttcacaggcaataatgttcagcgggctttcattgccctgctggtgacgcagaatcaagcctttcgccacgttagaggcgattttttcaagaatggttggcccaacggcggtggtcactaaatcaacctgagcaatcaggtcgatggcctcctgaccggcgctgttcacggcatttacattgctgacggtctcaacggtggcctgctcgccaaccacgttgacgttatagcctttacggcttttcagcgcatcgagcaaaacaggatggacgtcggcaaacgtgagctcgacctgtgcgtccgcaagcagtttgccgataaaaccacggccaatattgcctgctccaaaatgtaaagctttcatgatgactccctaaaacggtgacaagaaccaggaagctctgggcttcgaatcaacaaccgggtctgctatccctacgctggatattggcagacccggttagtcacgttctcaaattttaaagctcgataaccctgaggttattgaggaactgcgtttaaccgcgcaggatattaagcacttcttcaacgctggtggtgtttgccagacggtcgataacgccgtcctcgtccagtgcgttagtcagtttggtaatcacgttaatgtgctcattgttacgagccgcaataccgataaccaaacgcgccgagtcgtcttcatcctcaccccagcgaatgccctgcggatactggcagaacacgataccggttttcagcacgcggtctttcgcttcgatagtgccgtgaggaaccgcgatagactcgccaagataggttgaggtcagctgctcacgggccagcatcgcctcgatgtactcttcttgcacgtagccacctttcaccagttgctcaccggcaaagcggatagcttgttccttgttgctcgcggtcagtccgaggaaaatattttccgggctaatgcggaacaggttggtattatccgcttcgctcaccagactgtcactcagggtggtgttaacgcgctctttatattcggtcgccttgttgacgtctaccagacgagcaaccaggtcagtatacagaccgctgtcgaggaagttggtcagagaaatatgctgcgcatgaggaacctgacgcatcgcacgctcggtgaggtcacgatgggtaatgaccaaatcgacgtcatccggcaggttgtttatcgctgtattggtcacagagatattgctcagcccggcatcctgtacttttttacgcagcacgcctgcgcccatcgcgcttgaacccataccggcgtcgcaggctacgatgattttacgcacggtagacaagtcacccgccacaccggttgctgcggcggaagtacctgccgaaacctggcctttggactgcgctttcatatcctgaacgcggcgtgtcgcggcctccagatcgtcttcatctttcactttcgagcttttgagcaggattgaagaaacgataaacgaaaccaggaaagccagcacgatagcggtaatgttagcgaagtaagtgccttttggcgtcatcgccaatacggcaatgatagagcccggagatgcaggagaaaccagccccccgttcagcacggtcagcgtgaacacgccggtcatacccccgagaattaccgccagcagcaggcgcggattcatcagcacgtatgggaaatagatttcgtgaatccccccaggaagtggatgattgccgcaccgcccgcagactgcttggcgctaccgcgaccaaacaccatgtaagcaatcagcacgcccatgcccggacccgggttggcttcaatcaggaagaaaatagatttacccgcgacggtggcctgctgtatgcccaacggggagaaaataccgtggttgatggcattgttcaggaacagaattttagcgggttccacgaagatcgaggccagcggcagcaggttatggataaccatgatatgcacgcccgcagccagcagtttggacaatgcctcaaccaatggaccaatcgccaggaacgaaagcacggccaacagcataccgatgataccggcagagaagttgttcaccagcatctcgaagccgcttttgattttaccgtctacccagcggtcaaagcgcttgatgcaccacccgcccagcggaccagcaatcatcgcgccgaggaacatgggcatatccgcccccacaatcacacccatcgtggtgatagcacccaccacgccaccgcgatcgccgccgaccagacgtccaccggtgaagccaatcagcaacggcagaagataggtgatcattggggcgactaacttggcaagcgtcgcgttcgggatccagccggttgggataaacagtgcggtaataataccccaggctataaatgcgccgatgttgggcattaccatgttactcaggaagcggccaaagttttgaactttgaccttaacgtctggtgaaaacataaaacacacccctattgatacgcgctaacaataagagcgcgctatacgtgataattattgggacggtattttccccaaaaccaagctatgggattccgtcgaattgctgtctgcaaggcgaactctagcacgtcattatgaccacgcgtagagaggcccaagggcgtgattacgatcacgagatcccccctcaccacccctcattttagtgacccacatcacataaaagccttgtaactaaagaacaaaggtcaaaaaaagcgcacatgacctcattatttgtgatctaaatcactttttttaggtcagtatttatcaccaaaacgtgatgaatatcacaatttatttttagcttaacgttgagacgaggtgattaaaaaaaccacagagaaccggaactcactcaccgagcgattttttaggaactaatgaaataaaattacagctaaaggttataaaaaaattaaagcacccgttcttatcaaaaagacaaaaatgaagaagacatgacacagaataaataaaaaatttataaaaaataaatgttttgtatgaagagggatctctttcgttaaatttttttatgactattataatattaaccagtggactataatcacctaattgattatttcactaaaggtatcattcacaatgagcattgtgactaactctatatataacaacgacattatcaatgaaacagttgaatattttttaaaaagaaaattttcaacctatactgaaatgaaatttacttatgccgtcatgaacaaaagaaatccctcagatttttttgcaatctcgaattacccagatgaatggaccagtatctataagagtaatgattatcagtatattgatcccgtcgttattacttcactcaataccatattgccattcccctggaatgacaatattatgattaacgcaaatttgaaattatctaaagtattttcgatcgggaaaaaatacgaaattataaacggctacaccttcgttcttcatgataatttaaataacttagccacactttcaatcctaattgataaagaaaacgaaattatcattaaagaggatattgaaagagataaagacaaactgcaaatgcttcttatcttggctcacgacaaattgaccactctttatcgagacattaacgctgtaacattaaaaaacaataaaaaaaatgaagagttattctcaaagcgcgaaaatgatgtactttactggtccagcatggggaaaacttataaagaaataactctcattcttggcattaaattaaccaccgttaaatttcatatgggtaatgcggtaaaaaagctaggcgttatcaacgcaaaacaggctatacgattgagcactgaaatgaaattgattaaacctgcttgagttgaaagggtatatcgaatggccatttttttaaataattttcaggtgataaaacccctttatggatcttcatgtttagtacatcctgatttctgtcatcgacagagactaatagtaagtatattttatcctgactctctgaaaatccttgttcgacgacgcttagatgtaacccggagcgttttagaataatatacatcgcatggctaacaatggttaaaatgccttcataactagactttaaacaataattaatcaaagaaagaataagcattaaagtaatggagttctgttcacagcccaacgtagttaccctttctttatcgacaaagaagcggcttgattcaacataattgcctttgggaatattttccatattaaaacaagatgaaaaagttcccgtaatcatattaggattcgctatttctataatacgcaaactgcatattactctacctttatatataccaaacaaataggttgtatcagaattatcatattcatcgaactccatgttttcattgcacagcacctcccaatccagtctgtctttgaacactttctttcttaatgaatacatctcctgagatttttcttttgtaagattattatagccaacatcaataaagttaatcatttccactccctttccatggtatgggttaatccatcgcgaaaaataatatctgagtattagagaattatctataaataaaacccattattctccattcaatattacttaataaaattaattcacccaatcaataactaaatttatgggtctattaaaatacagagagttacgcgataaaataacgtaatagcgtttattcaataaatcgagtgaatgattgaaattaatagataaggcgtatctcaagcagcgttgaaaaatttgaaaaatccagcccctccatccaagaactttctgtgtacggtagccacttctctctatacgaaaatcaatattcttatgttacctaaactaaagtacaggtaatattatttaagaagaaagcagaataagtagcagagtcattaatttttggaataaaaatattattaatatattagaaatttttcaattagtccgcgtttaaagctaagttaatttaacgtcggacggaggattgtacgatggtaacactcacaattatactcatatccattaaaatcatttacttaacattaaaaattgttgtctcagtaaggtatctgctgtgggggaaatagaaggaatagaccctgtacgctcaatctcacatttcgctcaaatttgtagcactttatcctattctataaaaaggtctggtttatgacccaataatacctatacttaagtacagcaataaacatgaagattccctggtgttggccaattggcagccccttatctcgccgagagtaaggggatttttttattttaaagttaataggaaagtattttctaaaaaataaagcattaaaatggctctttatttttcaaccactgcaaatagatgataaaaataataaagagcctgcctctgataaaataatacagaagatttttctaaatagtttctaaaagacgagggtattccgcttatttataccggttgactggcctgatgaataacgtcaagtacctgatgtaaatggctggcatcaatttggccgggtgctgaaggtttaccgaccatgccgaaggtcaaggctgaaccggttaattcaccggacaagcgagacaccacgcctatgcctttcatcgacattgtcagcagcggcctttcggcatactggctgtgcatttcccaggtcgcattcatcagacttaatacgtctcccgagtcatgaggcatggtggctattttaaggatgtcggccccagcgcctgctggtgacggagacggcgaatgagttcttccttcggcggcgttttcttgaaatcatggctagacatcactatcgcgacaccttgttgatgtgcctgtgccacaaccttgcttaccaccgcttcactgcggaacatctctacgtccagcagatcggctttgccgttgttgaggatttccagataaagactgccatacgctgcgtcgctgatggccttcgcaccgccctcggcctcagtcctgaaggtcactaacatcactttgttgggtaagagttcagcaacctgacgcgtcattttagccacggcaattttgtctagcgcgttgtccagatagtcgaggcgaaattcaaccacatcaatctctttcaccgcggccaactgtcgtacggagtccaacacttcagattcctgagtggccgttgtcggcacaatcagctttggtgcaccctcaccgatagagattcctttcacctttaataatttaatcatgcgcttgttccctcccttggggactgcaatggcgcctgacggtgtcaggctgtcagagtgagaaatggccgctgaggcatttttaaggacaaaagctcccgcaatcagcgctgcgcctgatttcataaattcccggcgtttcataaaataacgtcctcaagacataaggctagtgatggttttgactaaaatcgaggttaagtattcttagataaggattcagctttgcgcgtcttcgaggtacttgttgcggactgcagcgcctccggccaacatcatgatgatagccatcacggtcaagaaccagaatgaggcatgccagcccgcggtgaaacggtgcagttgtccgaagaagaaaggccctgcggcagcaaatacgtatccgataccctgggtgaaagaagacaacgacgcagctccttgaacgctgcgcgtgcgcaggttaatcagctggaaggtggcagggatagtcatcaggccaggtgccgcaacgacggcccaaacccaggattcacccggcatatacaggaagcccatatatcccacaatctgcatgacgccgccgattgccaccacaatgtacggttttttcatcctcccgagataaattggcaccagaatggagtgcgcgatcccgacgatgttatatacaaacagcatgtcgcccgcgttagctgcgctgatcccattctgaatgagataggtaggcaaccaattgagcatggcgtacatactcatcatgctgacaccaaagaggataaccatcgaccaggcaactggccatttccacaccgcaatgtgtttaacagcggattgcgctttctgctgcggttttgccaccgtcgcatcgctctggtgatgggtacggatagtctgtaatacccaaggcagcgccgcgatcaatgcggtcagagaccatagcgccacgttggcacgccagccgtcggactgagaaataggcaccgcaatcgccgacggcagaccggccgataccgcaatcatgaccgcataagttgccgtcagaccgcctacgctgtcgggaaaatatttcttgatggtaggttgaaccagcacatttccgaagcccattccggccagcgccaaaatactgcaagccacaaaaactgggaagctagcggtgaaggttcgcagcccgataccggcgcagaccagcagcatggagagcaacagcgcgccttcatagcccagtcggcgagacacagaggcggtaagcgaaccaaacaccgcaaacgacaacagcggcaacacaccgaggatattcgcgttaaacccggaaatatcgtgctcgataaaaccatagatggcgctaagtgacgtgacggcggcgcgcaggttaagcgacactaaaaccagaccaaccaataccagcgttcgcctggctggaatagtcgaattggaggcgggtttattggtttgaggggccgctttcgcggccggagtctccagattgatagaactaggtagctcagacatcttgtctctcctcagaaatgaaagcgctctacgttagtttgaaaactgatgagttttaccaaaacaggtttcttgcaacgctttcatggcctgacgcgctacgctggctggatcttgcgctttcaagacatcgctaaacacttccagacctaaaggaccggtgtaaccctgttcttgcagatactcgataagagtatgaatcgggaacttgccctgccccggcagcagtcgacgatggcgggcggtgtcgataaggttttcaggatctggctgctcggagaggtcagaaagctggaccaaaaagattttatccatcggaataccgtgtaaatccgctaccgtgcgttgacgaacaaaaatgtggaaggcatcaacgaccagcccaagattaggttcattaacgcgctgaaccattttccaggcatcggcggtattgttgattttggtactccaggccataccttcataggcaatgcgcaaaccccgttgacccgcctgacgagccagccagcgtaaatcttcttcaatacgctcaccgacgcactctttatgcgtgcaggccggtgtaagtaatagggtcgcaccgagagcaaccgcggtatccaacatccgcagcgcctcgtggcgtttatcttcgcggatgctgtcaggcgctccgtcaaaatccagcagcacctgataatcagtcaatccaacgggcaacttctgcaatagcgttttaatacctgcggtatctcccccgctggcttcaacgtcttgtctccaaagctcaacctgttgaaaaccggcgtcatgcgcagcacgcagtttgtcatcagtcgttccacctaaacatacggtgttaataaacaatggattttctgcctttttcatcataattctcccgatactggtgcttgttttcgccgtagcgaactctttattttgcgcaaagcgcgaccaaaaaataggtgagcgatgccgtacagaacaaaaatgactctgccggaaacctgcttaaagccaggacttgaaagcgagaataaagcgtttcacatcagcttgtttgaacagcgaaatcgagtcatatactgacctaccctctttaatggacttaatcataatgggaccttctttacgatgttcgtcttattctcgagccttaagagtagtcataaactttattgggaagggaatactgtttaacagtggtaagccataccgaaaaagtagtatgttggattaattacctttgatctgcgtcaacgttattcgtcaagtttgtcagtctatttttattcactgaaatcttcttattatagacaataatatttataaaggttttgtatggatttaaaacggttgcgttatttctgcgttattgtagaacaaggctctatcagcaaggcttcacgtattctcaatatttcacagcccccgctcagcaagcggcttcaggagctggaggaggaggtaggcacgccgctggtatcccgcaacgggagcggaattaccaccaccgaggcaggcatggttttgtatctgcgggcgtgcgatattctgcgcaacgtcgaggaggcacgcagtgaagccatcttcgtggcgaacaataagaaggagattttacgtatcggtatttcctacttgtttcaacgccatttcagcccgctaatatctgaattttatcaaaaacttgaaggcgtaaagatcgaaacaatcgtcgctgactccagcacgcttgagtcaatgctggataaaaaacgcatcgatatcggcctttttcaacagccaaaaatggcaagcagttacgaatgtatcagtatgcaaccggtgaaagcggtcgccgttgtctcaaaaaaattgctgccagcgccgccaaaagatcacatattgctctccgaactggggcaacttccactgattttaattagaagaatcaatggcgaaggcacgtttgagtacattaataatcagctgcttaggcttggcgtgcggcccaatattattatttccgccaatgagccgagaatggtatgtgagttaatcgcatcaggaattgccgcagcgtcaatgatgcccgcctgcgaggtaccgccacaggcactggaatattgtcatatcgtggatatttacccgacgccgaatatctttttcccgacgttcgtgaaattagctgctgcaccgcatcagccagaattactgaatattttgttacattaccaggatcaaaacatttaataggaaacatcccgagagagtattatttaatatccatacttgcgctggtaaattaatgtttcagtagcaaccgcctgtgatgttaattattgattaatacagatccaaagatgttaaagatccgggcagatattcagggcaatgtgctctatttttcacagagctggcttttatcttgtcagctctttaccctactcacccttgatatttagtttggaacgagtgttcgtaatgaaaaagttattcctggtcgttgtggtggtggttggtttggccgtttggtggttcaagcgtacaccaccgcgagaccctcactacgatgccgcagcgtgcgtcgcggtcgatgtgatgggtaaggcagctcccgacaccgatagcgctttcttaaataaaatccgcaccgtgattgataatgaaaacagcgattattcagtgagtaaggtcaagtttagcgagagtgtggctatggtatccattaaacgatatcagtcactgagctcagggcagaaggccatagcaggtcagaatctagacagctgtatcaatgtcatggcggcaggtccgtcagacaaggcaaatcagtaggcgaatttgtgaaggggagataacacagagccctctcaggctctgcgttcagacagagataattatttgccctgcgccttgctgatggcagcctgcagctgttctgcagacactgcgccaggcagcacggtagtgttgtcggcgttagcgccactgactggcatcacgataaagccaggcgtgccctggaagcccaaagattttgccagttcgtcatttttcgccaacgcggcatgcgtttcctgacggtgtgcgtcgcttggcagcgcagcatgtgctttttcaaccgcacccgagatatccgcatcggtcagcttgccttcgtcatgcccagtcgcataaatcgcattgtggtaggccaggtaagcctgcgcgcccttctgcttatagacatactgcccggtttcagcagcagtgattgatgctttccagcggtcgccaaagattggccactctttgaagatgaagcgcacgttaggattcgccttgatggtttgctccaccaccggcgccatgtggctacagtacatgcactggtaatcgaagaactctacgaaggcaacttttgcatccgcagggccgtaagacggagtgtctttgtcctgcaacagcgcaggcgcattacccagcaccgcgttgagagaatccgtttcctgctgttgctgctgctgagcctgcagcttctggcttgcctgcaccaacacttccgggtgcgcgatgatgtattcagaggcaatcttgccgatagcctgttgttgggcatcggtgaaagtcgcgctgctgtctgcggcggcggccaaacccggcgtcgcaatcagcgctgccagcaatgtcatcatatgacgtttcataaaaacacttcctttgagtatgagactaaattctttcacaattttaaaacagatgaatgacataaaagctaatgtattacgctaacggcttgcacctattaattgtgaacttttatgaatcacgcggccattttggcaaaaaaccacgcaatagacgtggtttttgtttttaactggcgaagttaaaaccgcaatcagaagctgcccgccacgagtttttgcgcatcgaccagcgcctgctgtttgcccaacagtccggtcatcatcgcattgtactgcgtcacctgctgctgacttgggaactgcacggaaccgttggcgaacgccacctgattcccctgctgaccgaggaaatcgcccacggcaataatgtcctgagtcaggcttgagagtgcgggaacgaccggaagcaacgcattggcgggttgagtcacatcctgagcatagacttgattataaacggctttcaggtcatcaggctgtttgagcgcggcctgcgcggtgtcggcggtcgccttggcagtttgaatctgctgggtaagcgtattcagcgtaccggccgcctgttgcactgccgctttctgctgcaggtaatcctgtggcacgcgaatttgggccagtgtgttcacggcaggggcgaggctattgttaactgactgcttcatctgacgcgagaaggtcagaataatggtgtaatcgtcggcgtatttaccgaatttctgcctttggtcttcgctcagcgtcggcagattttgcccactgcgcatcaccgtattctgcagataatcaatgaaggctttcctttgttccggctctttatcgccacaggcggtaagttgaaaaaccatgagtaatgcaactacaggcgccagccagcgcgcgaatgtcctgctcctgatccctacagccatttcctgactcctgattcaatattattattaacagctgataacctgagcttattaggatagatgatcctgcttgcttaggatacagcaaagaagcaactgccccgcgccagtgcagtctgcacgaatgcggtgaaaaattaccctcgcccaacttgacccatccgcttttcatccgccctcaaccaccgccgatatcttttaataaattaattatcccgctgtttataaaggcattaaccctgacattcccctgatttatttctgattaaaagcgatctggcaaggatattgcctgtttgtcagcagcaggagcgatagcgggaaaccggtgtcgccatacaatttgaaataaggtcactagggttccggtccgcgttttgcggatggctggtccgagagtgaccgaccgccctctggcggttacacggcgggataaaagcccgggaggccaaagcgagaacctttctcgccgccgacctcctgcaccttatccgtggttaacgtcagaggaaatataatgtttaaagcttgccaacgcctgctgtcctgcgccttatgccttgcagcccttcttagccagcccgctctggccgccactaaacctactttcaaaatcgcctggtctatttatgccggctggatgccctgggactttgcccagcagagcggcatcctcaagaaatgggccgacaaatacggtatcaacattcaatttgtacaggtaaacgactacatcgagtcggttaaccaatataccgcaggaggatttgacggctgcaccatgaccaatatggacgcgctaaccctccctgcaaccggcggcgtagacagcactgcgcttatcgtcggcgactactccaacggtaacgatggcatcatgctcaaaggcgcaggtgatgtgaaatcgctgaaaggccagtccatcaatctggtccagctgtcggtgtccgaatacctgctggcgcgcgcgcttgaaaagtccggcatgaccgagaaagacgtcaccgtggtcaacaccgccgacgccgacctggttgccgccttcggcactccggccgtgaagtcgattgtcacctggaacccgctgctggcagaggctaaaaagcagcccgacagccatgaaatcttctcctcagcccaaatcccgggcgaaatcctcgaccttttagtggtgaacagcaccaccctgaaggcccatcctgagctcggcaaggcgctgaccggtgcctggtacgacacgctcaatgccatgaaaggtaacggcccggaagccctcaaggcccgcagctttatggcgcaggagtcgggtaccgacctcaaaggctttgacgatcagctggccgcgacctacctgttcagcaccccgaagcaggcgctggactttatgaaaggtccacagattaaaaccaccatgcagtccgtggctgagttctccttcaagcacggcctgctcggcgaaggcgcgccggatgccaccaccgtcgggataaccacaccgtccggcaactggggaaatccgtccaaccagaagctgcattttaccgacacgttcgtgaagctggctgcggccaacaagctgtaattgctatccctgttaactatctgaaaggcattccgatgcgtaaaatgatcaactaccaaccgcaacgcctgtcacgcagcctgctcgggcttttacccctgctgctgctgatcctggtttatttgatggcgtcggatgcccgtctgtcggtcaatgccttcgataagctgctgccgagctttagcgccatgggcgacgccctttaccgcgtagcgtttcaagccgatccacgtaccgggcaatatctgctgtggaccgacacttacgccagcctgattcgcctgctgagcggcatcgccatcagcgcctttctgggactggtgctgggtatcttctgcggcgcgctgcccgcggtgcgttcgttgatttctccactggtgacgctgtttgcgctgatcccccgctggcggtcctgcctattctttttatcattttcggcctcggtgaactgtcaaaaatcgtgctaatcgccgtcggtgtgacgccgtttatcgcccgcgaccttcaacagcaggtgcagtcaatccccacgaacagctgatcaaggcgcagacccttagcggccacagtgggcaaatcatgtggcggataatcctgcctcagctgatgccgcgcctgttcgacgcggtacgcctgtcgctcggctcggcctggctgttcctgattgccgccgaggccatcgccgccaccgaagggctcggttatcgcatcttcctgatgcgccgctatctggcaatggacgttatcttgccctacgtcgcctggataacgctgctcgcctttgccctcgatgccttgctgcgcctgataagccgccgctgctggccctggtattacgttaaataagccccactggagcaaaaaatgagcttactcagtatgcgcaatctggaaaaacactacggcaatcaggtggtactcgagcgggtcaacgccgaagttcaggagggagagttcgtctctatcgtcggggcatcaggctgtggcaaaaccaccttcctgaaaatgatgctcggtacggaaagccccagtaagggcgaactgctgctcgacggcaaaccggtcattcaggaaccgggagaagatcgcggcgtagttttccaacgttattcggttttcccacatcttaccgcactgcaaaacgtgatgatcggtgaagagttcgtccaggcgcgctggctgggtcgcgtgtggggcagcaagcgtaaggcgattgccgaacgcgccaccgacatgctgacccaggtcgggctcggccatgcgctggataagtaccctcaccagctttccggcggcatgcagcaacgtctggcactggcgcaggcgctgaccaagaagccgcgtatcctgctgctcgacgaacccttcggtgccctggatccaggcatccgcaaagacatgcatcagttgataaccgaactatggcagaaacacaaactcaccattttcatgataacccacgacctcaaggagggtttttccctcggttcgcgcctgtgggtgttcgacaaaatccgtcatgaccctcaggcacctgacgcctggggcgcaagtattacctacgacattccgctagaggagcgaaaagcatgagtgaatcccacgaaattctgtaccaaacccagcttcaagccggttcacactggtcaatgcgggtaaaaagcggatcggcgctgcgcctgaccgacgtcgagggcggcgccaaccttggcatgctgttttacaatccagagaacctgctcgaacgctacaacgcgccggataccctgaagtgccagcacaccttccgactcaccgaaggacactgcctctactcagacatggggcgcattttctgcggcatcgagcacgacagttttggctggcacgataccgtctgcggcaccctgaatgcggcgcagaccgagcagcggtttggtgcgctgagctatcagcaggcgcacaacgcccgtcatcagaacggctacgacagtttcctggttgaactggcaaaatacgggcttggaaaacgcgatatggccgcctgcgtgaacctgttttcaaaagtcaccgtcgacgaaaacgggtatctggcgctcgacacacgcccgcagccgacggccagcgtcacgctgcgtttcgcgatggacacgctggtggtgatgcacacctgtccgcatcccatgaccgaggcagcacgctatccgcgagcgcctatcgatatcgccctgctggccggtagcgcgccgctgcccgctcactgcctgcaatcggcggagaaccagcgcggccaggccaacaatgacctctaccatcacactacttgctgccagggagcacactgatgatccagacaagccaacagcataccgaaaccgccctttttcgtcagtccatcgccgccggagactattggctgcaccgcatcgaggccggacaaacgctgcgcatcgtcgatagcgaaggcaatcaggccgcggatacgctgtttttcaacgccgacgacgtcggtgagcgctacagcatgaccgatactctgcgcggacaaagaaacgtctttctgagcgccggcaccacgctacgctcgaacgacgaccgtccgatgctggagatagtcgccgacacctgtggacgccacgataccttgggcggcgcctgtgccaccgagagcaacaccgtgcgctattcgttggaaaagcgccatatgcacgcctgccgcgacagctggatgttggcgattagcgagaacccgcagtatgggctcaccaaacgcgacattactcacaacataaatttcttcatgaacgtccccgtgacttcgcagggcggattgacctttgaagacgggctctccgcgccggggaaatacgtagagttggtggcgaaaatgaacgtcttagtgcttatctccaactgtccgcagctgaataatccttgtaacggctacaaccctacgccgattgaagtggtgatctggtaaatccagtcagataacgcgtgcttcgggacgacccgcaaaatgccacgcaacagcaatacagcaggacgacctgcccgtcgcacagagagtcaaccatgtttaaatgcgttctgattgccaatcgtggcgccattgcggtgcgcatcatccgcaccctcaagcagttgggcgtacgcgccgtggcggtctacgccgaggccgaccagcattcactgcacgttcgccaggccgatgaggccttctgcctcgggcgggcagcgtgcgcgacacttacctcaatcaggataaattgctggctatcgcgcatcagtgcggcgcacaggcaattcatcccggttacggatttctcagcgaaaacgccgctttcgtcgagcgttgcactgccgaaggtgtggtgtttctcggaccaaccgccgcgcagatggccgcttttggcctcaaacacagcgcccgtcagctggcggagaaatgccaggttccgctgctcccgggcagtggattgctgatagatttacggcaggcgctgcaaagcgccgacgagattggttatccggtcatgctcaagagcaccgcaggaggcggcggtataggcatgcagcgctgcgacgacgccgccagcctcagtgaggcattcactcgcgttaaacgcctcgcaggcaataatttcgccgatgatggcgtatttttagagaaatttgtcgccaaagctcgacatatcgaggtgcaaatctttggtgacggcgcaggaaacgttattgcgctcggtgaaagggactgctccgctcagcgccgaaatcagaaggtcatcgaagaaacgcctgccccgaacctgccgcagccagtgcgtgaggcgctgcaacagaccgcggtgcgtctgggtaaagcggtcaactatcgcagcgctggcacggtagaatacgtttacgacgtcggcagtgagcagttttattttctcgaggtgaacacccgtttacaggtagagcacggcgttaccgagcagatttatggcgtggatattgtcagctggatggtacagctcggcgctgactgcctgccgccgctctcagcgttcgccaacctgacgccgcagggccacgctgtccaggtacgcctctatgccgaagacccggccaaacatttccaaccctgcgcggggttgttaagccacgtcagttttccgctcgcacccgacggcgctcagctgcgcatcgacggctggattgacagcggttgtgaggtttctcctttctatgacccgatgctcgccaaagtcatcattcatgccgaaaatcggccactggcgctggcggcattgaaccaaacgctacgcgatactgaactctatggcattgaaaccaatcttgattatctgcgtcatctgctcccacagcccgccgttattaagggggaggtgatcacggcgacgctggcgggcgtagactatcgcccggccacctttgacgtactcacgcccggcacattgaccagtattcaggatgcaccaggccgctgcggttattggcacgtaggagtaccgccttcgggtccgttcgacagccgctcatttcgtttgggcaaccgcctgctcggcaacgacgagcaggcagcgggactggaaatcaccttacggggcccgacgctgcgctttaatcgcgactgcgctattgtcatcagcggagcagagatcgacgcccgtctcgacggcgagaaactgtcgatgtggcaagtctgtaccgtgcacgccgggcaaacgctggcgctaggtccggtcgagggtgagggctgccgcagctatttgctgctggcgggtggcatcgactgcccacgctatctcggcagtcgcagtactttcacgctcggcaagttcggcggtcatgcaggcagacaactgcgcagcggtgacgtgctgcacctcgccgcgccgcgtttaacagagcgaaagtccctaccgatcagcttgctgccagagtggcacgaggtgcgcaccctgcgggtcatttatggcccgcagggtgcgccgaaatttttcaccgagcaagatattgcggcatttttcgacgccgtctggcaggtgcattacaactccagccgcactggcattcgcctgatcggccctaaacccgaatgggcgcgcagtgacggcggcgaagcgggtatgcacccgtccaatatccacgacaacgcctatgcctttggaaccgtggattttaccggtgatatgccggtaatcctcggccccgacggtccttcgctcggcggctttgtctgcccggccacggtgattcaggcagatctgtggcagctcgggcaattaaaatccggcgacaggataaggtttgtgcccgtgtcgcttgaggatgccgaccggttggcgcgcgatgctgaggtggagctctcaacgctgcactcccagccgaaggctgggatcgcgacaattttacaaaatccactgttatggcaccgcgcagcgcaggatgcgctgccgtcggtgagctatctcgccgcaggcgatcgatttattttggtggaatatggcgatccgattttagatattgccctgagatttcgcgctcatgccctgatgcagtggttggaaaacaaccgattggcgggtgtgctggaactgacgcccggcattcgatcgctgcaaattcattttgatagcctgctttgcccgcgcgacgccttgatccgccatctacagcaggcagaagcctcacttggcgatttacagcaggccgaggtgccttcacgcaccgtctggctgccgctcagctgggacgacgacgcctgccgtgaagctatcgagaaatacactcagtccgttcgccccggagcaccctggtgcccgagcaatatcgaatttatacgccgaatcaacggtctaagcagtgttgaagaggtgcgggaaactctgtttaacgcccgctatctggtcatggggctcggcgacgtttatctgggtgcgccggtcgctacgccgttggatccgcgccatcgcttggtcaccaccaaatacaacccggcacgcacctggacggcagaaaactcggtcggcatcggcggtgcctacctgtgcgtctacggcatggaaggccccggtggctatcagttcgtgggccgtacgctgcaaatgtggaaccgtgaccggcagaccgaggcctttgtacaaccctggctgctgcggtttttcgatcagattcgtttttatccggtgagcgccgaggagctgaagacgattcgccagaacttcccgtatggcgattatccgctgcgcaccgaggagggcaaattccgcctcgacgagtatcaggccgctttggcgacgcagcagtcggaaattaccgcgtttcagcttaagcgacagcaggcattcgaccaagagctggcgcgctggcgtgcagacggacagttcacctttgacagcagtttgcaggaagcgtcgttggagcctgaacaggcgatccccgagggctgccacggcattgacagccatgtcgccggcaacgtgtggcaatggctcgtgaaaccaggcgataaagtatcattgggtcaaacgctcgggatcctggagtcgatgaaaatggagatcccgatttcttcgccggtcagcggtacggtgaagagtctgactcgtcagcccggctcgcaggttcaggccggacaaacgctgttgatcgtagaagagtagaataaggccgcccatgcccactgggcggcgcacatcacattttttcatgctatttatcgctcttttcgtgcaatgtgatttatttaactatgcttgtattcataaacaataatttgagtggcgacttagagaaagatggccgaaaagaatcaattggacacgcaatccatcattaccttcccaaatgatgactggagagccaaaactggagcaatttcttcagccgtagaggagcttgagcagggtaagattttatttttccctcatcttggctatccattgaatacacagcaacaaagcctgctggaccccgctctggttgatccaaaaagaaaaaacatcagctatgacgtgggcagacaccagattaagggcgttgccaattcggagaaagagccacaggtaagaaaactgctggaagactactatcaggcctgcagtgcgttgatagacactgttctgcctgaatatcagagtgttttgcgcagaccggtcaatagtttacgtttgcacccggtcagtgaatggcgcaacaagagttcctggcgaaaagatgacagccgtctgcacgttgacgcttttccttcgcgcccgaattacggcgaacgtatcctgcgcattttcaccaacatcaatccccacggtgaagaccgggtttggcgcattggggaaccgttcccgcagctcgcagaaagatatttaccgaagctggccggtttctctccgttcaaaagctggctacagcataagctgcatatcaccaaaacgccgcgcagccactacgaccatctgatgttgcagatgcacgacaagatgaagtcggacgacaactaccagaaaaatggccagcagattacccagcgcttcccgccgggcagcagctggatatgtttctctgaccagacgccgcacgctgcgatgtcgggccagtttatgctggagcagaccttcctgctgtcggtgaaagacatgcacaatccggacgcgtccccctgcgcacgctgcaacggataaccaacaaacgcctactgtaggctgatttcctggatgatttgccggcggcgttcacgcagcgccgccgttgaagccagctgctgcgctaccagcgccgccggagccacgtcaggatgtccggcgttgaaaggcggcgcggggcgtactccagccccagctgaatgcgctgggcccgttcctcaccggcaagctccgcaaccagggtcagcgcaaaatcaatccccgccgttacgccgcctccgctgaagatattgccgtcgcgcaccacccgctccgacacgggaatagcaccaaaccacgccagcgtatcgagatacatccaatggcaggcggcgcgttttcccctgagtattcccgctgccgccagaatcagtgagccggtacagactgaagttacataggtcgcgttgtccgcaagcctttggatatggctgataaaatcgggatttttcatcgcgtcggtgcagcctccccgcccggtacacaaagcacgtcgcactcggtcagactttccagtggctggaggctggcaaaattcaggccctccgagacaatgctttcaccgccgagcgaggcggcaatcaaccgcgcacccggcaaatgcatcagcacctgccagggaccggtgaagtccagctgcgtcacgccgggatacagcggaaacaccacggttaaaggtttattcatcatcgactcctgttaattaggttgttctacttaacctaaccgatctacatttgacctaaaggtcatagttccctcaaaaagcgccatttacctgaggtataggctcatgcgacagctcggctttattatctttcccgacttcaacctgctcgattttgccggcccactgacggcgtttgataccgtctcccgcgatctgccctccccgctttaccagtgtcacgctctctccgtcgacggcggattagtgaaaagtacgccgggaatcgaggtaatgagtgaaccgctggataaccaaaggcatttcgacacgctggtcatagccgggggcgcggggtcatggcagccatgaacaatgcccaaatacaggattttttgcgccatcagtatcgcctcgggcggcgcgtgactagcgtctgctcgggagcgtttatccttgcggccaccggtctgcttgacgacaaacgcgtgacgacacactggtcaaaggcgcagaggctgcaacggtgttttccggcaattcgagtcgatcaggacaagatttttatccagcaaggcagactctggacgtcggcggggatctctgccggtatcgatctggcgttggcgctgattgaacaggatgaaggtcgcgaggtcgcggcgagtacggcacgccagctggtggtttaccaacgccgtgcgggcggccagtcgcagttttcggttttacaggcgttagacccaagttcggatcgcatacgcatggccctgagctatgcgcgtgaacatcttgcagcccccttgtcggtgggtgatttggccgatgcagcctgcctaagcctgcgtcagtttggacgactttttcgcagcgaaaccgggcaaactccggccaaaatcatcgaacagctgcgcgtcgaagccgcccgcgaacgcatcgaatgcggccacgagacgctagaggttgtcgcccgtcaggtgggattcgttgatcccgaaagaatgcggcgggcgtttatacgccttaccggccagccgccacagggattgagacggctggcacagcgcggttagagtccttccaacgcttgctcaaaatcggcaatcaggtcttcggtgtcctcgatgccgatactgatcctcaccagtccttcggtgataccactctcgagacgaattttctcaggaaccgcgctgtgcgttgtgctggcagggtgacaggccagcgagtcggtgtccccagtgacacggcctgtgtgaccaacgtcagcttgtcgaggaactgccgtgcagcgccgcgtcctcccttcaattctaccgccataataccgccgaacagcttcatctgtttgcgtgcgacctcatagccggcatgagtcttcaggcccggataaaatacggcggcaatcgccggatgctcattgaggtattcggcaattttttgcgcgctgtgggagctggcttctacgcgcagcggcaaggtttttaatccacgggtcatcagcgccgcctcgaacgggcttagacaaccaccaaactgcttcaggcacagcgttcggataggatcgataagctcgcgtcgcccagcgacaacaccgccggtcgcatcgccgtgaccgctgatatatttggtcgccgagtgcagcaccacgtcgatgcccaactgcagtggacgggtaagataaggcgtagcaaaggtgttatcgaccacgctgaccgccccggcctcacggcataaacgcgcgacctcttccagcgagaggatacccatcaccggattggcaggcgtttcaacgaacaccattttggttttttcggtgaaggccgctttcaatgcgtcgagatcgggcacaaacacaggtttgatgccgtagcgcggcagcagattgcgaatcagcccttcggttccgccatacagcgcgccaatatgaataatctcgtcgccgcttttgagcagcgcaaacagggtcgcactgaccgctgccataccactggcgcacgccaccgccgactcggcgtcctcaagcaccgccattcgctcctcaaaggccgtgaccgtgggattgccaaaacggctgtacatataacccggctcttcaccgctaaaacgacgttcaccgctgtcgaagtcgccgtaagagaaggaagaggtggccgtgataggggtggtgatcgccccgctttgcgcgtccgggtgttgtccgccgtgaacggccagcgtgcgcataccgagtgacgcgtgattacctgactttttcatagggcatcctgtttattaaatttggccaattaagaattatggtagcaggatgtaaggccgtgaataagtagtacagctcttatattcgatatgaatatcaataagaagattaagtgcggggcggctagaaatccgtacgtccaaatcataaacagcaggcaaaaaaaaaccgattcggacacaaggccggaaccgggtttttcaataatcggcgagcttattgcaggacagagatatccgccacctgcaggaacagctcgcgcagtttgctcaacagcgtcagacgattgatacgcaccgcttcgtcttcagccatcaccatcacgccgtcaaagaaggcgtcgaccggctcgcgcagagcagccagttcaaccagcgcttgctgatactgacccgcaacaaacagtggctcgagcttgtcgcgcaggaccaccaggtgggttgccagcttcacctcagacggctctttcaataccgacgcgtgaacctggtcgtaaagggcctcgttcgattttgccagaatgttagacacgcgcttgttggccgcagccagcgttgccgcttcgtccagggtgcggaagtaggtcacggccttaacgcgagcgtcaaagtcggccggtttggtcggacgacgagccagcacggcctgaatggtgtcaaccgcgtggccttcttcctgataccaggcacggaaacgacccagcatgaaatcgacaacgtcatcgacgactttctcgttggtcagcttgtcgccatacagacgtaccgcttcttcggtcagcgtttgcagatccagaggcaggttcttttcaacgatgatacgcagcacgcccagcgcggcacgacgcagcgcaaacgggtctttgtcgcccttcggatgttggccgatgccgaagataccggccagggtgtccatcttgtcagcgatcgccagcgcacaggccaccagcgattcaggcagctgatcaccggcaaaacgcggctgatactgttcgttcaacgcaacggcaacttcttccgcttcgccgtcgtgacgggcatagtgcatgcccatcacgccctgcgtgtcggtgaactcgaataccatgttggtcatcaggtcgcatttagacagcaaacctgcgcgcctggcgttctcgacattggcaccgattttatcggctatccacccagacagcgcctgaatacggtcggtcttgtcacgcagcgtgcccagctgtttctggaacagcacggtctcaaggcgcggcagattgtctttaagacgctttttacggtctgtgttgaagaagaactcggcatcggccagacgcggacgaaccactttctcgttaccagagattatctgctgcgggtctttcgactcgacgttggcaacgaagatgaagttcggcagcagttttccggcggcgtcgtacaccgggaaatacttctggtcacccttcatggtgtaaaccagcgcttccgcagggacggccaggaatttttcttcgaatttcgcggtcagcacgaccggccattcaaccagtgaggtcacttcttccagcaggctgtcgctcaggtcggcgataccgccaatctcggcggcagccgcttcagcgccctgcttgatgacggctttacgctgctcgtagtcggcaatcaccttgccgcgctcgagcagaatttgcggatactggtcggcgttgtcgatagtgaattcggactcgcccataaagcggtgaccacgaacggtgcgcgcagagtcgatgcccagaatagtcccggcaataagctcgtcacccagcagcagggtcacggtgtgaaccggacgcacgaactgcacgtcggagtcgccccaacgcatcagttttggaataggcagtttttgcagggaagtcgctatcatcgctggcagcagcgcctgagcgctctcgcccttaacgtgtgcacgataaaccagccactcgcctttgtcgcccaccagacgatcggcctgttcgacggtgattccacagccgcgcgcccagccttcggccgctttggtggcgttaccttcggcgtcaaacgcctgagcaatcgcaggaccgcgtttctcgacttcgcgatcggcctgcgccgcgctgaggttggcaacttttaccgccagacgacgcggtgcagcaaaccactcaaccgcgccgtgtgccagattggccgcgtccagctcagcggtcagattggccgcgaaagattcggcaaggctacgcagcgcctttggtggcagctcttccgtgccgatttccaccagaaatgttttttcagtcatcactgtttctcacttctcgttctttttgcacatcgggaagcccagcgcctcgcgggaagcgtagtaggcttcggccaccatcttggtcagggtacggatgcgcagaatatagcgctgacgctcggtcacggagatggccttgcgcgcgtccagcaggttgaagcagtgcgccgctttcaaaatacgctcgtaggcaggcagagccagcggattctcgagagccagcagcttttgcgcttctttctcgtgctgttcaaagctgtggaacaggaagtctacgtcggcgtattcgaagttataggtggattgctccacttcgttctgatggaacacgtcgccgtaagtggttttacccagcgggccatcgctccacgtcaggtcgtaaacgctgtctacgccctgaatgtacatcgccaaacgctcgagaccgtaggtgatttcaccggtaaccggcttgcactcaaggccgccgacctgctggaaataggtaaactgcgtcacttccatcccgttcagccacacttcccagccgagaccccaggcgccaagcgtcgggttttcccagttgtcttctacgaagcggatatcgtgaacggtaggatccagacccagctctttcagcgagccgaggtagagctcctgaatgttttcaggcgaaggtttgatcatcacctggaactgataatagtgctgcaggcggttagggttttcgccataacggccgtcggtaggacgacgggaaggctgaacgtaggcggcagcaaacggctccgggcctagcgcgcgcaggctagtcatcgggtgggaagttcccgcgccgacttccatatccaatggctgaacgatagtacagccctgttgtgcccagtaatcctgaagtgtcaggatcaggccctgaaaggtcttggtatcaaacttttgcatgttggtttcgcacgcgagacaagtgagtttataaagagtcggacagtatacccgctgcacggaagataatcagctaccgcttccgactttctctgcctcacaaaaaggcataaaacagaccaaatggtccgccgtttgccacattaaggcgcaaggcaaccaggcatagcccggcgtcgggacgacgagtgcccgtaatccggtcgcgcaggcgtttatttgccccgccgtgcctgactggcatcaacattgctagcctccttataacacgaacgctaaggaggcaagcctatgtcaaccgaacacaatcagagccattaccgctatcgcattttcgcgatggtcttttttatcgccttgatcaactacatcgatcgcggcgcgctctcctttgcggccaatgatatttcggccgaataccacttcactaaactccagctcggcgcagtgctcggatatttcggctttggttacctgtttggttctctctgcggggattgctggccgacagaatcgggaccaaaaaagtttggcttatcgccggcggcttgtggtcgttgctggaaattggcaccgcgtgggccggtgagcttggggtcgcactgttcggcggctcggcaatcatgggctttgcggtattgcgtattctgtttggcttctcggaagggccggcctacgcgttgatgaacaagactattgcccactgggcaccacgcagagagcgcggcttctcactgggcattgggctgctaagcacccaggttggtgcgctgctgaccgcgcccctggcggtaggtttactgctgcttacccacgactggcgcacgatgtttattgtactgggcgtcttttcgctgctggcaatcgccgtgtttgcccgtgggtttaccgatacccccgcgcagcatcctaaggtgacgccagcagaactggccgctatcgcgcaagacgcagaggtacaggataccggctctcgccagccgtggtgggcgttttttaccagccgtacgctggtgctgaatgcactgggctatttctcgttcctgtacgtcacctttgtgctggtcacctggagccctaaatatttgcaggataccttccactatgacctgcattccctgtggtacgtggcgatgatcccctggaccggcgcctgcttcaccgtgctgctcggcggcaagatagccgatacgctgctgcgtaaaaccggcaacctgcgtctggcgcgcaacgtttttgccgccgtcacgctgctgctgaccgccacctgtttcgtacttattccctacgccagctcaccgttcgagataattctgctgatgactctgggcaacgccttgaatgctctggtaaataacctgtactggtcggtggtgattgacgtctcgccgaaggcgtcggttggcacctacagcggcatgacgctggcgatagccaacgtggcgtcgatactcgcgccgacgttaagcggctatctggcgcagtaccacggctatggtgcgatgttcaccgcgacggcggccgtgtctttttgcagcatgctgtgcatgaccctgctacagcctgagaaacggatgaaaaaacgggaacctatgccgcagggtaaacaggtagcgcttgcagaaaaatagcattaagaccaagattgcggaggccattttccgcaatcttgggagcaagacgatgacacgatgcagttgggtctcgaacgatccactttatattgaatatcacgataaagagtggggtgtgccgataaaagacggccgcgtgctgttcgaaatgctgtgtctggagggtcagcaggccggactttcatggattaccgtgctacggaaacgtgaaaattatcgccgctgctttcaccagtttgtgcctgagcgtatcgccgaaatgaccgagcaggacgtcgagacgctggtgcttgaaagcgggattatccgtcaccgcggtaaaattcaggccatcatcaccaatgccaaagcctggctcgagatgcaggccagcggcgaagacttctcaacctttgtctggcagttcgttgaccaccagcccatcgttaacagcccacagggtccgggtgaggtgttggcaaaaaccgagatttccgatgccatgtccaaggccttgaaaaaacgcgggttcaagtttattgggtcgacaatctgctatgcgtttatgcaggccagcggcctggtgaacgatcaccagacaaactgcctatgccatccacaacgcatgactgcgtgatccgccgcgcggactctcaagatatcaacgcattagtgctgctctggctacgcagcacgataaaagcacacccttttatcagcgaaagttactggcttgaaagtgcggcgatggtcaaagaaacctttttacctcaggcccgtacctgggttgcctgccgggcagaaaataaagaaatagtcggtttcatcagcgtactaaatcagcagtttattggggcgttatttatcattgaggaattttacggtagcgggttggcgcaggaattaatgtcggtagtaaaaaattattattcaaagctgctgcttgaggtttatcaacaaaacgatcgtgccgtggctttttatcgtaaggagggatttggcgttattaccgatacacatcatcccggcaccggcctgccgacgtgggtgatgagctggcaaagcttgtagtgaagcaaattattaatattaacttaataataacaccctcttattttaatgatatttattattcacaacgcattaagcggtttatcttttatgctcccgctatgtttctatttaattaaataaatcggagtaacgtaaataaagttaaatgtttttcctatatcactcaaagcggatttatctgagtgataaattttggcttttctcgcataaagagcgcggacggttatcaacaagccgaatttatcttgaaggaaaaataaaaatgaataaacgtattctcgttattgccagcggtctgtgccttacgctgggactctcggcctgtaccaccaacccttacaccggcgagcaggaagcaggtaaatccggcattggcgcagggattggtgccgtattaggtgccggtgtggggatgctttcttcatctaaacatgaccgcggcaaaggcgctctgattggcgcagcagcaggcgcggcgctcggcggcggcgcaggctattacatggacgtgcaggaagccaagctgcgcgacaaaatgaaaggcaccggcgttagcgttacccgccagggcgataacatcgtgctgaacatgccaaacaacgtcaccttcgacagcaacagcagcacgctgaaaccggcgggcgccaacacgctgaccggcgtagcgatggtattaaaagagtatcccaagaccgcggttaacatcgtcggctataccgacagcaccggcggccacgacctcaacatgcgactgtcacagcagcgtgcagacggtgtaggcagcgcgcttatcactcagggcgttgccggcagccgcgtacacacctccggcgcgggtccggcgaaccctatcgcctccaacagcacggcagaaggcaaggcccagaaccgtcgcgtagaaattacgctcagcccgatgcagtaatcgacaaatacaaaagtttttacttaaacaccggcaagaaatgccggtgttttctcctttgtctccccgcactgtgctagtctcgataattatcagaaaacccctttttctctattatcgcaacaggttatctggcgaccatcacaggagatccagcgtgagcagggctaagacaacgcagacaccagctcccagagcaaccatcagggacgtggccagcgccgccaaaacgggtaaaaccagcgtttcgcgttatttgaacggggaacagcatctcctttccgatgcgttgaaagaacgtatcgaacgggccattgccctgttggactatcagcctagccagatggcgcgtagcctcaaaagtggcgaaacacgcctgattggcctgatcattgccgatattaccaatccctactctgtcgaagtcatgcgtggcgttgaagccgcctgtcgccagcagggtctgacgctgttggtatgtaacaccaacaacgaattcaatcaggaaaaacattacctgcaattgctcagcagctatcgcgtagacggcatcgtggtcaatgcggtcggcatgcgtgaagacgctatctcgtcgttgcaacagtctcagctgccgatggtgctcatcgaccgcaaagtggccaatttctcctgcgacgttatcggcctcaacaatgccgaggcaacgaccgaagtgacccagcatcttttggatcagggttttgaggccattctgttcctcagcgagcccgtgaccatcaatacccgtctcgtgcgcctgcatactttcctcaaacagatgcagaaagagccgcaaaaattcgccgagcagggtgaggtggagctgaatgacagcgccggcctggaaaaactgttgctgaattttaccgagcgctatccggacaagcgacgggcggtcatctcggtgaacggtgcgctgacgctggtcatcgctcgcactatgcgaaaaatcggcatagtctggggtaaggatatgggtctgctgggatttgacgatctcgaatgggcagaactggccggtgtcgggataaccacgttaaaacagcccacctacgacatgggatacgcggccctggggcaactggtgaaacgcattcagggaagcgacgaacctatccaggaacatgcattttcgggtgaactgatcgttagaggttcaacccaaccgatttaagtcacactcgacacgacagcctaaaatcgtgacggctgtctcgttcttgacccacaagaacctattttcctgataagcaacttccacttggtaccggttccagttaacgtaatgttaacagaaactacgcctgtgattaaaattggcctacctttaatatcgggtctactgcgctatttgaattttctatccgctggtctcagaccatctttcaaattttaaacaacgcgacgtcgctttaaggatattggcatgaaaacaccagagaacggggctgaaatcgttattgttaccgctgcttatggctaccaggcagtcaaagatttaggcgggcaaacgcctttgctcaagcatatagccgaggccggcgccgacggcgtcgagatccgccgtgaactgtttactgatggagaagttaacgacctcaaggtactcggcgaaaaaatccgccagcacgggctgtttgcattttattcggtccctgaatcgctgtttctggaggacggcaaggttaacccttctctggaaagcttccttattgaggccgacagcctcgatgcacgaaagctgaagattgccctggggctttcgttccgggtgaagatcttacgccgctaaaagttctgctccaacagcacgccgttgaactggtggtagagaatgaccagaccaaaaacggtgtcctgcatccgatgaatgccttcttctttgccgcagagtctttgcaccttcctgtcgcgatgacctttgacatggctaactggctatgggtgggacaagacgcgctggaagccgctaatacactccgtgaacacgtcagctatgtgcatgtgaaaaccgccgaacaacgcaatggcaaataccatgccgtggcgctcgacgacagcgacggcagctggaaacctgtgttggacgccctgccacgccatgccccacgcggcattgaatttcctttagaaggcgatgacctcaccgccgtgacccgccattacgttgaattactgcgtaaggaagcgaaagaagcgtagcgataatcaggtggcaagatgagtcaaatcttcaataaatgcagccaaaagtgtcgatattgccaattttcagagggaaaggagcctaaagatgagcaaggttaaattagccgccaaacgttggtggttcataatgcccatcatttttatctcctacagtctggcctacgtcgatcgttctaacttcagctttgccgccgccgccgggattaatgaagatctcggcatgaccaaagggatgtcatcactgctgggcgccctgttttttctcggctatttcttctttcagatcccgggaacgatttacgccgagagacgcagcgtcaagaaactggttttctggtgtctggtgctgtggggcgcttttgcgtctttaaccggcatcgtcaacagcgttccggctctgttgatcatccgttttatgctcggcattgtcgaggctgcggtcatgcccgccctgctggtgtatatcagtaactggtttacccagtcggaacgatcgcgcgccaatacctttctgattttgggaaatccagtcacggtgctgtggatgtcggtgctctcgggctacctcatccacgcctttggctggcgtgagatgtttatttttgaagggatacctgcggtgatctgggctttcttctggtggttcctggtcaaggataaaccttcagaagtcagttggttgagcaagaacgagaagcaggcattggccgatgcactggccgaggaacaggacaatatcaaggccgtcgctaactacggtgaagcgttccggtcgcgcaatgtcgttctactctgtattcagtattttacctggagtatcggggtttacggcttcgttttatggctgccttctatcctgcgcgccggaaaatcgatgggcatggtggaggccggttggctctcttcggccccgtatctggccgcaacaattgccatgattctggtgtcatgggcctccgataaactgcgtaaccgcaaactgttcatctggccgttattactgattggtgccgtagccttcttgggctcatgggccgtcggtcagcataatttctggatatcttacggcctgctggtcatcgcgggggcagcaatgtatgcgccttatggtccgtttttcgccattatccctgaaatgttgcccaagaacgtgtcgggcggcgcgatggcgttaattaacagcctcggcgcgctcggctcctttttcggttcctggttcgttggctaccttaacggcagcaccgggggtccgaatgcctcgtttatctttatggcgagctccttgctggtctccgtcatcctgaccctgatggtcaaaccggaaaaaacgtcggaaccgcttgaggcgcactaaaatagtctttattttaatcagatagttgtatttctaaacgaacagctttactaaacgcagagtctacctaatcgctagcttgatggagtaagtaatgaagccgtctattgtcctctacaaaaaaatctcagccgatctgcttaaacgcctggaacagcactactcagtcgttcaatttaatggaattacagccgaaaaccgcacgcaggtttatgaagccctggaacaggctgaaggtttaatcgggtccggcggcccaatcaacaaagaactgatcgaccacgcgcctcgcctgcgcgccgtttcaaccgcctctgccggattcgacagtttcgacgtcgccgaactcagccgtcgcggtattccgctgttgaacgcaccagcagccctgaccgataccgttgccgacctggtgttctcactggtgctggccgcgtcgcgtcgcgtggttgagttgtctaaccgcaccaaggccggcgaatgggatggcaacgcgccagccgactggttcggtctggacgtgcaccataagacgctcggtatcgtcggcatgggccgcatcggtctggcggtggcgcagcgcgccaacctcggcttcgacatgccgattctctacaacgcacgcagccagcatgccgaagccgaagaacgttttggcgcgcgtaaatgttcgctcgacaccctgctggctgagtcggatttcgttgtcgttatcctgccgctgagcgatcagactttccacatcatcggcaaagaacagttcgccaagatgaaatctaccggcatcctgataagcgcaggacgcggtccggttatcgacgagcaggcactgattgaagcgctgaaagacggcactatctacgccgccggtctggacgtttatgaaaaagagcccatggcgaaagactctggcctgctgaagctggataacgtggtcaccctgccacatatcggctctgcgaccgcacaaacccgttatgacatggatgcactggcggtagaaaacttgattaccgcactgtcaggcgagaccaacgagttcgtggtcaacgcgaaagacctgaaaaaatcctgatttttttgtacgccagtgctgaaggcgcgacctctgttaccccaacgggacagaggcgcgccccagtgtctctcgccctctcttttcacgaatctgcatcttggtgcttcatccgattgcactgctttgacgcaggcgttaaggtgggcatcactttctgataacactacaagcttgctatgacgttttctgttttcggcgaaaaatttacccgtttttctggcattacccgcctaatgggcgacatgaatgacggtttacgtaccccggtgcagtgatgctcggcggtggaaatccggctcaaattcctgagatgcaggcctatttccaggaattactgggcgatatgctggccgagggcaaactcgccgaagcgctgtgcaactatgacggcccacagggcaaagacgttttgcgtcatgcgctggctaaaatgctcaatgaagaacagggctgggaactgaccgcagacaatatcgcgcttaccaacggcagccagagtgcgttcttctatctgtttaacctgttcgccggtcgtcgcagcgacggatcgctgagcaaggttctgttcccgctggcacctgaatatctgggctatgcggacgcaggcgtagaagaagacctgtttgtttcggcgaagccgaacattgagctgttaccggaaggtcagtttaaatatcacgtcgatttcgatcatttgaatatcggtaacgatatcggcctcatctgcgtatcgcgtccgaccaacccgaccggtaacgtgctgaccgacgaagagcttttccgcctcgacgcgctggcgcagcagcacgacattccgctgctcatcgacaatgcctacggcgtgcctttcccggggattgtcttcaccgatgcaacgccactttggaacccgaacattatcctgtgcatgagcttgtccaagcttggcctgccaggttcacgctgtgggatagtggtagccgatgagaaaatcatcaaggcaatcagtaatatgaatgggatcatcagcctgtctccgggcagcgtggggcctgcaatggccagcgaaatgattgcccgtggcgatttgttgcgactgtctcaggaagtcatcaggccgttctactatcagcgcgtgcaggaaaccattgccacgctgcgtcgttatctgccggaagaacgctgccttatccacaagccggaaggcgccattttcctgtggctgtggttcaaggatttgccgattaccactgaggtactttaccagcgtcttaagcagcgcggtgtgctaatggtaccgggcgactacttcttcccaggactcgagcagccatgggcgcatacccagcagtgtatgcgcatgaactatgttccagaagcgagccagattgagcgcggtgtggctattctcgccgaagagattgagcgagcacatcaggaacatcgcatcgcctgaggtaatgacgtctcaggttcatgatgtcagtaaataaaaaaccggaaggcctgtgcggcacttccggttttttttggcctattcggcccaataatctcggttaaggcttactgcggcgtattttccagcgcccgattttcaggtggggtattatcggtcgcgatagcgatacgctgtggctggagtgccggtgggacatcgcgcaccaggctgatgtgcagcagaccgttcacgaactcggcggacgatacctgcatatgctcggccagcgtaaagctcagggtaaatgccttacagaccagaccctgatgcagatattccactttgctgtcaggcgcggccggtgtaccactgacggtcaaccttggaccttcaacctcgatattaagctcgctttgtttaaaaccggcaagcgcgagggagatgcgatagtgattatcgtctgacttctcaatattgtaagggggaaattgaggtctccaccctgcagcgagctggctaatttatcaaagccaatccattgacgcagaagtggtgaaagatcgtggttacgcatattaactccttcagtgaagcgagatgatgacattcttctgcggtgcgccggcgcaatgccgcggcacagcctccttacggcaggctaaacagaagtttgttttttaattaaacgcttaaaaaattagataatttcaatacgtcgtggctttgaggcttccggcacgacacgttgcaaatctatataaagtaaaccgttactcaaattggccgatttaacgtgaatatgttccgctaattgaaattttcgttcgaaattacgttcggcaatcccctgatataaataggtccgctcggcgggagcttgagtatgtgcgccttttaccaccagcaaattgtcctgtgcggtgatatctaattcagactcggcgaagcctgccacggcaatcgcgatgcgataattattttcgtcaactaattcaacgttgtatggagggtatccccaccctgattttgaccagattcgatcagattaaacagtcggtcgaaaccaatcgcagaacggtacagtggagagagatcgaaattacgcattaaaactgcctcctaatattgcagcgaggaaaataaagaccttccatttggacagatcgataacgcataaataccctaacggcgtattcttttgcagcgtcgtatgataaaaatggcgttgaaagaggaaatttcaagttctctaaaaaaaatttttttatttaaaaaaaagaccgcattgggggtcctggcaggatttatgctggctgattttcaccgatcgccgcgattcaacgttaattctttgaataagtactataattttatacgtcctaattttaaacgcactttctgaacctgttcttgtaggtctattacggagcattctcagcccgacagttagagatgagtttaaagatgaagaaactattattgcctgtagcgacaggatgcgtctttatggcaagcggatgttcaagcgtgatgagtcatacgggcgagtatcaaggctactatcccggctctaaagcagacgtaagaatgatgaaaagcaacgataccagctgggcaatgacccctttactggtattggatttaccctttagcgcagtgatggatacgttgctgctgcctatggactattacaatcgcgacaataccggtactctcgatagcatcaaggccagcgaagcgcacaacctggctatcagtcacggcgtcgatatcgatcacgttcccccagtcacgaccgccgcaaactgatcatcggcttagcttgcggcgttctattctcagaccggcgtgatgaatatctgattaaaacctgatatttcacgcatgaacgccacccattttccatcgggtgagaacacaacggcatcaccacttggcggcacctcggtacgttccgtcagagcatgcatttcgccgctggctacgtccagcagtaccaccgaattatcacacactaacgccagcgccttgccctgtgggtgccagctaaacgccgactgaatatctgaggccgcgtggctgatttgccatggctccccgcccacaggcgaaacgccccatacctgcacgatgccccgacagtctttcatcaggaaagcgagggtggaaccgtccggcgatgcgcgcagccagtgccgaggctgagacaccacgcccggataaggcctgtcggcggtgaaagttaatcttctctgcatcacccctgacggcggcgcgggcaggcgggtcgccgtgccctgcaaaggatgttcacccgctacgcgataggcctcgtcgttgtcgggcaaatctaccacgaacacttccggaagtttttctcccttggcggacagcgtgtcgccgataaaagccagtgcccagcgttgacgctggccgttggcattgacatagcctcgcgtacctatccatccctcttcataggcgcgattgatctggtcactgcccggctgcggctgcggcgtggtctgactgaccagcacgcaaaaatggctgccatcgtactcgcgtggatgcatcttcgacgcccgcaccggatgattggcaagcgccacaccgacgttacgcaggtcctgcgccggatcccactcgtgcatcacgtgatcgttataggtaaaactcaggcgactgccgtcagggctgaaaacgtgaacgtgagagccgccccgcagcgcgcctggcgtgtagggttcggtaatatcgaaggcgtccagagtgacaggtagcgccgatttttcggcgtcgaggagagttccgcgacgatggtggaaatcatatttccagctcgcatcgggattttcaggtccgtgaataaaaacataacgtggccgagcatcgggactgacggtaaccacccctacgtgtgcgccctgagaggcacagtagagcgtctcgatttcaccgctggaaatattgacccgctcaatggttaatccactgaaatcgctgcctttgggacgcacatcgtaggccagccagcgactgtcggcggtccagacattaatgttggtcagctgatgaccgcgcgtatcaaaggttaactgcttttcgcccgccacgttattttccttaatcgttcagtacaaacttctcaaccgcgaaagccacgccgtcttcgctgttggttttggtgacaaactgactgaccgccttgacgctgtccagcgcattgcccatcgccacgcccaatccggcgtatttcagcatcgcgatgtcattttcctggtcacccagcgtcatcacattttcgcgaggaatacccagcttctcggctaacaccttgacgccctgacctttattcactgacttgtcgaggatctcgagataataaggcgagcttttcatgatggtgtagcgtgatttcgcctcttcagggatctcggcgatggccttatccaaacgctctggatggtcaatcatcatcactttcgggaaggtcagcgagcggtcgatttgatccacgctgcgatagcgcagtggaatgccggttattgaggattcatgcacggaataagggctgatatcggggttagtgctgtataggtcgctgtgtgacagagcgtggaagccaacattcagctcacgcgccattttttcaaaatagacaaaatcatcgaatttaagcgttgtttcggcgaaaatactgccatcttttgcatgatgaaccaacgcaccattgttggagatgcaataaaatccgtctttttgcagactcagctcctgaagataacgctgaatgccgataagcggtcttccggtcgccaggacaacctgcacgcctttattaattgccgcggtcagggcttgttttaccgcgggcgttatttcatgctgcggattgagcaacgttccgtccatatctattgcgatcaattcaattgccatagcgtcctcagagttaatgtcattttttccatgctagcgcgtttcagcatctcaaagcgaggcagaaaaaggctaaaagcggataacgtcaccggtaaagatattcttaatccaataggcgctgtcgtaaggaacctcctgcagcttgataaaataggcctgcttatagctacgggttgggctagtcataaaaagccgggtgattgcctctatgcggaaaaagcttttctgatcgaagatatattccccttccatattaacttgcgtggtgagccggttgataaggggcttactgctatcggcatcaatataataaatggcaatcgcggcgttatgcttgagccgccaactggggtcaaacatccacccctgtgacaaggcaatattcaccagcttgcccttcgaagaggccgacataaatgccgggtagttggtcacgatttctccggcgcggaactggctgatgttttcctcagtgatatccaccacccgcaccagactttgtctttcgggcattttcggcagggcgttaagggcgctttttagatgctgtgacgtacgcatcatctgcgcactcggatgtccgctaagcagcgccagattgagcgaaaaattcaggttgcttttgcccgaaggccaacttcttttgcgcgggtagtttcggtactctttctgttttggcacaaatgaccagccgcgcagcgcctctttctggtcggtcgagagcgtcataaaacgcctgacgtaatcatggcgatagccgcggctaagggtgttgccccgccaggcagacggatgcatgatcagttcagtcactaacctttcccattctgcattatcaaagccataaatattttcagttctcgggacacaggcgccccctatggcacgcgggcaacgccgcaacctccgtgttttggaggttttatagagtttgcgaacgcctttacgtaacggcctgtgcagcaggcgcattaaatcgaaaggcggcaccataaaactggcaatctctttgccgctggccttaaccagcttttttaacgccggttttattgccaccagaatcgccctttgcagcatctggcccgccaggcccgctgtacgcccggctctcattgccatcaatccggctttaatcccggacgcgcctaatttaatcattggaataccgagcgacagcagcgccagaccgagatcgaacaaatcgaaggccaactcttttagtgtaggacgatattcagcgtcattaatcttgcgttgaatgacgtcaaaaaatggcacaaaagagagtattttctctaaaaggctgcgatcaaggtgttccgttcgccaggcgtcaacaaagcgtttcacctgcgtatgctgaatatgtatcaacgcttcgcccagcgtaggtttctccatgccgagcttaatctcacgatcaaacctgacaatgatctgctgtgcgtccggcacgatatcggcgtagtccggccataatgccgtgagcaagaattgtgccttaaggttttccggggaacccgtcctccgttttgaagcccggcgatggcctcgacctgagtatcggtcagtacctcgctcaggtccgccaccagcaataccgagccccacatgctggcggcgtaacgtttccccgagtcaccttgaagaatgaaaataaaagccccaagtttcagcgtttctaccctttgtgccgtctgcggcaaaagctcgctctggtaggccccggttctgagcgaaaacagcggcgtaaatggccgctcaagatccaaaggactgattagctgaaaggcaacagtctgctcaaccgcacgtactgaatcatcaaccgcatgatttttaagatagtcattgaactgcgaataatatttttcaaggctgcagagcttttccctgctcttgaaaggctctgcaggacgactgtgccgcggcataaactggttgttatagaatttgatgacctgctcaggggtgaaaaccttccctcggctgaggtgagcctctaaaaagcgcgactcgaaatcgcgcgcggtgggattaagatcccagttgagcacttcgtatttaacataatacagaagggattcatggcggattatttttctggccagcggaaagtaataggcatcgtcgtcgggatcaagcttctcattaacatagttcaataacggctcatcggcccactgaccttgctcttcgtgacgaaaaagtattctggcagacgacagacgattctccggcagtgaatcatagccaagtggaggagaatcatgcaggaaagttaaaatatcctgcaacggcctctgccattggcccggcagtgcattcgatagcggtcgtgtagcgttagtagaggaagataatggcgtcgcaacctcggccggaggctcggcaacaatgggagtccaatattgttcatcgccacggttgcgctgcgctttggcgtctcggtccagttgcagcctgcgggaatgcgcttgctcccgacgtttagcattaggcggcctggtcgattcccctggaggggcgacagtcgatcgatttttaacaacggcgatgaaagcgcaattgaaggccgggtggcgtttttcattctctgcaatggtgtagacttttccgtataataattattagaaacaacgggataagattttgatgtgggaggcggcagagaaattttttttatcggcgggtgcaataaaagagtgctgtgagacgcgggcttgagggagaaattcgtggggtattttaccttaggcgttttgctctcagccataagcgcttgattgcctggcccggcgctcgctcgcggtaggtaagccaaagcgccgaggcttagcgccgcaagtaaaaccggacctttaccgcgagtccgcttttcagctctaaaactcgacggccgcatcggcacgttttgggtgttttgaatcaggatcttttccgactttccggcaaaggtataaaaatccctgcctttgacttctttactctcaattcgaatctgctgtaactgcgtccctacaatcctgggcataaatagacggctccctttccatttaacataatactttatgcgggttttctcgcctttatggtttcgaacatcctgaaactcgggcaaaaaaaatccgaaatggtttcccacttcggatttagagagactatcagctgtactcagcgattagatatcgatattcgctgctttcagggcgttttcttcgatgaaagcgcggcgtggttcaacggcgtctcccatcagcgtggtgaacagctgatcggcagcgatagcatctttgatggtcacgcgcagcatgcgacgctgatcaggatccatggtcgtttcccacagctgttctgggttcatttcgcccagacctttataacgctgtacggacagaccgcgacgggactctttcaccagccattccagcgcttgctcgaaggtggaaatcggctgacggcgttcgccgcgctcgatgtaggcatcttcttcgatcaggccgcgaagttgctgacccagagcacaaagcttacggtattcaccaccgtggatgaaatcaaaatcgaggtcataatcagtatcaacgccgtgagtacggatacgcagaaccggttcgtagatctgacgctcacgattttcacgcacgatagcgctgtagctgctgccgtgagactctttttcgttaagcaacacgaccagttcttccatccactgctgcactttttcacgatcggtcagagaagtttcttccagcgttggctgataaaccagattgttcaacagcgcacgcgggtagcgacgctccatacgaccaatcattttctgtaccgcgtaatgctcggcaaccagcttctccagcggctcaccggccaaggcaggtgcgctggcgttagtgtgcagcgttgcgccgtccattgcgatggcgatttgatactgatccatcgcttcgtcatctttaatgtactgttcctgcttaccttttttcaccttgtacagcggcggctgagcgataaagatgtggccgcgctcaacgatttcaggcatctgacgatagaagaaggtcagcagcagagttcggatgtgtgaaccatcgacgtcggcatcggtcatgatgatgatgctgtgatagcgcagtttgtccgggttgtattcgtcacggccaatgccgcagcccaacgccgtaatcaacgtggcgacttcctgagaagagagcattttatcgaaacgcgctttctcgacgttaaggattttacctttcagcggcaaaatggcctgattcttgcggttacggccctgcttcgcagatccgcccgccgagtccccttccaccaggtacagttcggagtgagccggatcgcgttcctgacagtcagccaatttgcccggcagaccggccaaatccaacgcgcccttacgacgcgtcatttcacgggctttacgtgccgcttcacgcgcacgagccgcatcgatgattttgccgacaacgattttcgcgtcgcccgggttttccatcagataatcaaccagcttttcgttcatcagggtttcaaccgctgatttcacttctgacgacaccagcttgtctttggtctgagaagagaacttaggatccggcacttttacagaaacaacggcgatcaggccttcacgggcgtcgtcaccggtggcactgattttggatttcttgctgtagccttctttatccatgtacgcgttcagggtacgggtcatcgccgcacggaaaccggcgaggtgagtcccgccgtcacgctgtggaatattgttggtaaagcagtaaatgttttcctggaaaccgtcgttccattgcagagcaatttccacgccgatgtcgtctttcatggtagagaaatagaacacggtcgggtggattggattcttgtttttgttcaggtattccacgaacgccttaatgccgccctcgtagtggaagtgatcctgtttgtcatcacgcttgtcgtgcaggcggatagccacgccggagttcaggaacgacagctcgcgcaggcgcttggccaggatgtcgtactcgaattcggtatggtttgtgaaggtctggaagctcggccagaagcgtacggttgttccggttagttcggtctcgccaacgactttcagtggattctgaggctcgccgtggacgtaggtttgttcgtgaactttaccttcacgacggataaccaactccagcttttcagacagggcgttaacaacagatacacccacgccgtgcaggccgccggacactttgtatgagttatcgtcaaatttaccgccggcgtgaagaacagtcatgatgacttctgcggcagagatgccttcttcttcgtgaatgccggttggaatgccacgaccatcatcctgaacggagacggagttatccgcatgaatcgtaaccagaatctctttacagtggccagcgagggcttcgtcgatagcgttgtccacaacctcgaataccatgtggtgcagaccagtgccgtcatcggtatcgccgatatacatgccggggcgcttacgcaccgcgtccagcccttttaataccttgatacttgaggagtcataagaattcgacatcaacgtttctcgctcatttttagtcctgtgatagaacggctattttaccttgttccacgcggaacatcttgcccttttcacccaccatatcggttacttgttcagcgctaactgcgctgacaaaaacctgggcctgggtggctttgaggcgatcggccaataaccggcgtttaccggtatccagctcggaggcaaaatcgtcaagaagatacaggcaacgccgcccgctctgtcgggtgagaaactcaccctgcgctaatcggagtgcacacatcagcagtttcaactgcccacgggagagtaaatcctccaccggcgtgccgtcggcacggatgcgaaaatcggctttgtgcggacccgatgctgtgtaagtcaaggctctgtcgcgctcgaactggcgctccagcagttcgccataatcgctttccttgtcccagccgcgctggaaagagaaggtcagggcaaactcgggcaaaaactgtgcacaggttgcgctgatatcagcggcgattgcccggctgtactctgcccgccattcgctgatgcgctcagccagtgggataagctcctgatcccacgcgcgaatctgcgcatagcgactcacctgacgcagcgcggcgttgcgctgcttgagtaaccgacgcaggttgctccaggcgataaaaaaaccgggatcgtgatgaaaacaaccccagtccaaaaatgcacggcggtattttggaccaccgttcagtaatgtaaaaccttcaggcgtgatcagctgcatcggcagcatttgcgccagctcagaaaccttatgaccgtcgctgccgtcgattctgaccttgctgtcgccctgacggcttttgctcaatccgacgctcagctcgcgctcaccgccttcgtcaatgcgcccatgcagaacaaattctggctgctcgtgacgaattacccttcccgcctgcaaactgcgaaaggcgcggccatgcccaagcgtatacaccgcctcgagcacgcttgttttaccgctaccgttgggacccacgaggaagttaaatccgggcgaaggcgctaagtccgccgcctcgatgttgcggaaatctttaatcagtaatcgcgttaatgccattaaaaagttttcttcatcatcaacagcacaagggcgttagcgtcgcagcgagtttggagacggctagcgcacagcaaccggagcgtacacgagtacgtgaccgacttagccataaaaaactgagcactgcccgacttcaaaatagccattaagctagcccgcttaaagtctcatcggcatgacgacataggctgcggccttactggcaccgtcttcaatctgcacgctggaaacagagtcggtcagtaacaggcgaacctcttcacatttcaaggcgttaagaacatcaagcacgtagctgacgttgaagccaatttccatttccgtgccgtcgtaagcgacgtcgagaatttcctctgcctcttcctgctctgggttattcgcggtgatcttcagctgattctggctgagatacagacgcacaccgcggaatttttcgttggaaagaatggccgcacgggcaaacgcctgcttgagcaggtcacagccggcttgcagcgttttgtcaggattcttaggcaacacgcgacgataatcagggaaacgtccatcaaccagcttggaggtgaagatgaaatcaccgacgtgggcgcggatattattgctaccgatttgcagttgcagcagggtatcgccgccgtcgagcaggcggaccaattccatcacgcctttgcgcgggacaataaccgagtgcgacggcaaagactggccgataggcattgagcacaccgccaaacggtgtccgtcggtcgcgacggtacgcagctcttcaccttcggtctcaaaaagcattccgttcaggtaatagcgaacgtcctgatgcgccatcgagaactgggtcgcttcgatcaggcgttttaacgtcgcctgcggcagggtaaattctacctcgctctgccagtcgtcaaggttcgggaagtcgctcgccggcagcgtagacagcgagaagcggctgcgcccggagcgaaccagcatacggtcgctttcgagggtcacggctatctctgcgccttctggcaagccacggcagatatcaaagaatttacgcgcagggacagtcgttgcacccacgtcatgaggctgagacagcgcaactttggcgaccatctccatttcaagatctgtccccgttagcaataacgcgccttccgtaacctgcaacaacaggttacccagaattggcagcgttggtcgtccacccagtgggctactgacctgttgcagtggtttcagcaaatgctcacgttcaacaataaatttcatagcgctaggaggagagtgtcctgattaagttagagaaatcttctttgatgtcatggctttcttcacgcagctgctcgattttacggcaggcgtgcaacaccgtggtatggtcacgaccaccgaacgcatcgccgatttctggcaggctgtggttggtgagctcttttgccagcgccatcgccatctgacgcggtcgggcaaccgaacgggaacgccgtttggagagcaggtcagcgaccttaatcttataatactcggcgaccgttttctgaatattatcaatggtgaccagcttctcttgcagagcaagcaggtcacgcagcgcctcacgcacgaagtcgatggtgatggcgcggccggtaaagttggcgttggcgataacgcggttcagcgcgccctcgagctcacgcacgttggaacgcagacgcttggcgataaagaacgccacctcgccgggcagacggatgtcattctcgtcggcctttttcattaaaatcgccacacgcgtttcgagctctggcggctcaatcgcgacggtcaaaccccagccaaagcgggatttcagacggtcttcgacgccgttaatctctttaggataacggtccgaggtcaaaatgatctgctgattgccttcgagcagggcgttaaaggtatggaaaaactcttcctgagaacgctctttgttggcaaaaaattgaatgtcatcgataagtaacgcatcgaccgagcggtaataacgcttaaattcttcaatggcattgttttgcagggctttcaccatatcctgcacgaaacgctcggaatgcatgtaaaccactttggcattggctttgcgcgccataatgccgttgcccacagcgtgcagcaagtgcgttttaccgagaccggttccgccgtataaaaacaatgggttataagcgccacccgggttatctgccacctgacgagccgcagcacgggccagttggttagatttaccttcgacgaagttatcgaaagtatgctttggattgacgttagagcgataagacagctcgggctgagcaggtgaactgtcccagctagggcgcgtaggagccgcgcgcggggcagttctggccgcgaccggagaactcacggcggcggcaacggtttcgttaacgcgctgaacaagtggcttgctgcccacctcaaaacgtaacaaaggcgcatccgtgccacaaaaatcgttcaacagaccgttaatgttgtttaagtatttgtcacgcacccaatcgaggacaaaccggtttggcgcatacagcgccaaggtgttgtcactcaattccgcctgcaaagggcgtatccacatactgaattctgtggcaggtaactcatcctgcaatctggcaagacactgctgccaaagcgaaagtgacacggcggactccactcgaacaagaccaaaaaagaaaaaggatcaggatattttttaaatcatgattttagacacacgcctcgctctgacatttacagctacgccacggggttgcaccgtagtgtgagaaaaatgttgaggagatgtcttcaggccaccctgtcagtgaccaaaagcgacgtgtgaaccgttttttacggttttttgtcggctaataagtttcgtttaaaaaatctacaagccgatcggccgtccgggatggatcagcgatcggaatggcggatcataacgcaaactgcgtcagagatcctccccttcctcacacaaaagatcctttttatccacaggcgtggttcgtcaagtgggtaagcttagccgatcactagaatattaggagggtgactcacgctttgcacagaaaaataagatttcactgagcatcattcacaggttttcaaccgagatcacaataagaatgttcaaggatcaagcggcgatccttgcgatttaggcaagagtccgtataatcctcagccctacgtgtgatacctgtgctcctgatggtcatcggtgaccacgggaatatttggtaaacatttaggcgcgctttctagcaatgtaaattgactcaggactgtacaattattacaatcccgcttctttatatgttgcgacaaaggcatcggctgcttctgcaccgagagcccacgcgtttactgatcagttttaattttaagtttaggtagaaatcgccatgaaacgcactttccaaccgtccgtactgaagcgcaaccgtagccacggtttccgtgctcgtatggctaccaagaatggtcgtcaggttctggctcgccgtcgcgcgaaaggccgtacccgtctgtctgcttctaagtaataaaagctaacctgtttagtggttaagctagcttttcccagggagttacgtttgttaactccccgtcatttcactttcgtcttccagcagccacaacgggccggcacgcctcaaatcaccatccttggccgcctgaacgagctggggcatccccgcatcggtctcaccgtcgcaaaaaaacatgtcaaacgcgctcacgaacgtaatcggatcaaacgcctaacccgcgaaagcttccggttaaatcagcatgcgctgccgtctatggattttgtcgtgctggtgaagaagggggttgccgatctcgataaccgtgcgttaacggaagcgttggagaaattatggcgtcgacactgccgacaggctcccgcatcctgattgccttgatacgcgggtatcaactggtaatcagcccaatgcttgggcctcattgtcgttttcggccaacctgctctcaatacggtattgaggcaattggtcgctttggcatggtaaaaggcagttggttgacgctgaagcgcgtattaaaatgccatcctttaaacccaggtggtgatgaccccgtaccgccgaaaaccgacaataacagagaacactaacgatggattcgcaacgcaatcttttcctcatcgctctgctgttcgtgtctttcatgatctggcaggcatggcaaacggaccacgctccgcaaccagccaaccagaccacgcaacagactgcgaacacagccaccggtgatgctgccaaccaggctgttcctggaagcggacagggcaaactgatcactgttaacactgacgtcctctctttgaccatcaacactcgtggtggcgatatcgagcaggctctgttgacgcaatacccagtagcgctgaaatctaccgctccgttccagctgctcgaaacaactccctctttcgtctatcaggctcaaagcggtctgaccggcaaaaatggtccggataatccagctaacggtgaacgtcctctgtacaccacaagccaggacagcttcaccttgggtgaaggccagaccgaactgcgtatcccgatgacctacacggctccaaacggcgcagtttataccaagactttcgttatcaaacgcggctcttacgccgttaacgtggcttataacgttaacaacactactaaagctccgctggatttgaccctgttcggtcagctgaagcaaaccaccgacctgcctaaatctcgcgataccggcaaccacagctttgctctgcacaccttccgtggcgcggcttactcctccagcgatgacaaataccagaaatatgcgttcgacaagagcgaacctctggatgtcaccacgcagggcggatgggtggccatgttgcagcagtactttgctaccgcatggatcccttcagcgaaagataccaacaccttctacaccaacaacagcaacggtatctcttcaatcggctttaaaggcgcacctttcgtcgttcagcctggcgctcagcagcaggtgggttcaatcctgtgggttggccctgaacttcaggaccagatggccgctatcgcgccacacctggacctgaccgttgactacggctggctgtggtttatctctcagccgctgttcaagctgctgaagtttatccacagcttcatcggtaactggggcttctcgattatcatcatcacctttatcgtgcgcggtatcatgtacccactgacccgtgcgcaatatacgtcgatggcgaaaatgcgtatgctgcagccgaaactggccgcgatgcgtgagcgtatcggtgatgacaaacagcgcatgagtcaggaaatgatggcgctgtacaagtcggaaaaagttaacccactgggtggctgtctgccgctggtaatccagatgcctatcttcctggcactgtattacatgctgtctggttccatcgaactgcgccacgcgccgtttgtcctgtggatccatgacctgtcggcgcaagacccgtacttcatcctgccggttatgatgggtatcacgatgttcttcattcagaagatgtcgccgaccaccgtaaccgacccgatgcagcagaagatcatgacctttatgccggttatcttcacggtgttcttcctgtggttcccgtctggcctggtggtgtactacatcgtcagtaacctggtcaccatcctccagcagcagctgatttatcgcggcctggaaaaacgtggtttacacagccgcgacaagaagaaagcctgatcgatagataacatcggtgcataatagagaaggcggtcaattgaccgccttcttttttaactaaattttagccagaactcagagaacgctatgaatacgtcagacactatcgttgctcaagctacgccgccaggccgcggtggcgtcggtattgtgcgcatttccggccgtgcggccagcctgatagcccatgaaatcctgggcaagctgcctaagccacgctatgccgactatctgccctttcgcgatgcagacggcagtacgctggaccaaggcattgcgctgtggttccctggccctaactccttcactggagaggacgtactggaacttcagggccacggcgggccggttatcctcgacctgttgatcaaacgcattctggcgctgcctgacgtgcgtatcgcccgccccggtgagttctccgagcgcgcgttccttaacgacaagctggatttggcacaggcggaggccattgccgacctgattgatgccagctccgaacaggcggcacggtctgccgtcaactctttgcaggggcattttcgtcgaagatccatcacttggtggaagcactcactaacctgcgaatctatgtcgaagcggcgattgacttcccggatgaggaaatcgacttcctgtctgatggcaaaattgaagctcagctcaatgcggtgatcggtgacctaaacgccgtgcgtaccgaagcgcgtcagggcagcctgctgcgcgagggaatgaaagtggtaattgccggtcgtccaaacgccggtaaatcaagccttctcaatgcattagccggtcgcgaagccgcaatcgtcaccgatattgccgggactacccgtgacgtgctgcgggaacatatccacatcgacggcatgccgctgcacattatcgacaccgccggtctgcgcgacgccagtgacgaagtggagcgaattggtatcgaacgtgcgtggaacgagattgaacaggcggataccgtgctgtttatggttgacggcaccaccaccgatgccaccgagccggccgagatctggccagactttatggcgcgtctgcccgcttctctgccgatcgtggtggtacgaaataaagccgatgtaacaggcgagacaatgggtaagacggaagtgaatggtcactcacttattcgcctgtcggcgcgtaccggtgaaggtatcgacctgctccgtgaccatttgaaagagagcatgggctttaaccaaaatatggaaggcggcttccttgcccgccgtcgccacctgcaggcgctggagcaggccgcacagcaccttttacagggtaaagaccagcttttgggtgcctgggcaggagaactgctggcggaagagctccgtctttcccagcagtcgctgagcgagataacgggagagtttagttccgatgatctgcttggccgtatcttctcgagcttctgtatcggcaaataggccctgtgtaaaatgtaagcacttactcacaaaagggctaatggcctttatgagtaagtgccacttcatcagctcgaaaacttttccagacgtttaagctgagcttccaacacctgacacaggttcagcatattctgtgggatttttacaaactcagtgacattctcatgcctcactttatgttttttgcagaaaatatcgattaaggtaattaaatctttggactttttgtaaacgctgaagttcatatttgaggttatcttaagaatagtggcttgcagtatgtcaatctcttgctgagcttttttatatagactaatgcgctttgttaataactctctctgtgagcccgtggttttttctaaaaatttattatcatgcgaaatattggcctcgaaactgttgtaagacgcggcgatgtctttaattatatgaccgatgacaattgatcgcttattgtctttttgggtaaaaagcagcctgccaacaggaagaggttcaccccggtgaggtgatttatcgtattcattaatcattttcatggctaggcgttgtttagcctccatctttccagaaaatccacggtggactcccaggtctaaaagattcttactcgaatcttggttttcaggagcatcaattctcccccgcggactcctcgcccccgcaggctcttagcctctggtagcaattcaggttttaaactggcagctccctccgctcctggcgctcctggcgctcctggcgctcctggcgctcctggcgctcctgaagcataggccaacgagcctccgattaaaacaatcgtccccaatgccatgaaaactttcaccgcgggaaagttgcattttaccgcgggagccttttgttcaatcaattcctgacaggggtgatacacttcttccatatttaccccgataaaaggatcggtgcataaaatgttactttctggtgatgaattagaattatttcctacattattaacatgattagcgaaacttgttttattaggaaaatctttctcaacatttttaactggcttatagcctggtatgttatttacattaatatatttaggcatatctaatatccttcctggataattattattctcgccagcaaaatacaccaaaaaatttgttatttatcattaaatatggacgaaattagattccattgatcgaagtcaaagggctatttacccacttcccgataaataaaaataactcttaataaaagctcataaatgttcttttcttaattaccttgcccctcctgactctattaaattaaaaaaaattttgcctggagggaatattccccctcgtccttcacctcgaaccctacccgctacgacccaggccttcggcggttaacgcgcaaaaaggacaaattttcctttataaaacagcaaaaagaacccaggcaactaacaggttattcttattcacctttatacgctccaggtataaatatttaatcgattagttatttatataatttacactaagacagtactatggacagacctcaagctaagccatgtacgaaccattactcagggagtgaacaatggcgtgccactttgcccgatggaccatcacggaaagcgagccggacatccaccgtttacccgcggaagtattaactttcgccaacaccctttccccgaagcctgccagacgatttatccacggacgtgtcctgcttgcagagctgatgttttatctttacggaatcgctcgactgccgcagataatcattcagcccagcggtcgcccaagtttttccgccagcggtttgcccgatttcagcctggcctatgcagggaaccagctgggcgtgatgctgagcggcgaaggtaaagcgggccttgatttagagattcttcacgccctcggggctagccatcatccccgccggtctgcattcactgtcgcagaaaaaaactgggtcaccctccagtccgatcccgaagagtcagcctcgcagctcggatgcatccgccagagcgtgcacaaactgtcgggccagagcgagttcaccgccgatacgctgagcctgcacccttcttcaggacgtttacgctcgagcgtaacctcagacgtgcaggtcatgagcgatattgaaggtcccatcgtctggtcgtgcgcacacagcccggccattcagcggctgatctgctggtgctacgatcccgatgagggattcatccgcaccgcgacattttcccccaacagcaggtcgattcgctacactttatgaaattaaccagtctaccgccggccaagtagccagcattgtagctatcttccccctactcaataagccaggagtcgttaatgtcagctcaacccctgaagtttgtcaccctgttaggcagcttgcgtaaagggtcttttaacgcgatggttgcacgcacgctgccgaagctggcgcctgaaggcgtcaccattgaggctctgccttcgattggcgacattccgctttacgatgccgatatccagcaggagtcgggctttccgccgaccatcgaaaaaattgccgagcacattcgccaggctgacggcgtcatcatcgtgacgccggaatacaactattcggtgccgggcggactgaagaatgccatcgactggctttcacgcgtgcctgagcagccgatggcggggaaaccggtgctgattgaaaccagctcaatgggggcaattggcggcgcacgctgtcagtatcatctgcgtcagattctggtgttcctcgacgccatggtgcttaacaaaccggagtttatgggcggtgtaattcaaagcaaggtggatgcacagcttggagaggttatcgatcaaagcacgctggatcaccttaccggccaactcagcgcgttttcagactttacgcgtcgatttaagaaataatttagcgggaaaaaaccggcctgattcgactcgtcccccaccgaaaagtaggggacgatatttaggcgattttatttgttatcaataaacgcgatttttagcacgaacagcagcgtgacaacccacacgcaggcgctgatgtctttaaagcgcccactgcccagtttcatcaccacgtaagagataaaccctaaggctattccctcggtaatcgagaagctgaacggcatcatcacggcggtcacaaacgcaggaaccgcttcagtgaggtcgtcccaggtgacgcgtgccaggcttgaagtcatcagcacgccgacgtagataagcgccccggccgccgcgtaggccggcaccattccggccagcggggaaataaagataaccaacaagaacagcagtccggtaacgacggcggtgaggccggtacgcccaccgatggccacgccggaacagctttcgatgtaggtgctgatagccgaagtaccgataaaggaacccgctaccgagctgaggctgtcgacaaacagcgcctgcttcatctgcgggaatttaccctcgctgtcggccagaccggccttgtcggtgacgccaatcagcgtgcccgaggagtcgaacaggttaaccagcataaaggagaagataacgcctgataggccaagattcagtgaccctttgatatcaacctggcccaccaccgacgtcacgctcggcggcatagaccacacgcccgcgtaatgcacgtcccccattgcccagccaatcagcgtagtaatgacgatggagataagcacggcggcatgaatgttacgcgctgccagaatggcgataatgaagaagcccagggcgcccagcagcaccgaatgcgaggtcagtttaccgatagtcaccaacgtgtcgggattggccaccacgatgccggcatttttcagccccatcatgccaataaacagtccgataccggcggtgatgccgacccgcaaactggacggaatattggctatcatccagtagcgcacgcggaaaatggtcagcaggaacagtccgaccgctccccagaaaatcgcgcccatgccggtctgccaggaaatccccattgcaccaaccaccacaaaggcgaagaaggcattgaggcccattgccggcgccagtgcgaccggcagattggcgatcagccccatcaaaatgctgccgaacgcggcaatcagacaggtggtcacaaacaccgcctgtttgtccatgcccgctacgccaagaatctgcgggttaacgaagacgatatacaccatggtcaggaaggtggtgaatccggcaaccgtttcggttttcagcgtcgttccatgctgagtcaatttaaacagacgctctaacagcccttgcccagcgccagcattattttgtggtgtgctcattagtgagttccaaagaggggaaaaacagtcggccgctatcctaccccaattaatccgttgaatgagatgaatctgctgctttttattgcatttttacaatcttttgacgacatttcggaccaactgacgttttttaacccttatttggtcacactttatcgcgcaacggaggcaataaggtggtcggaactggcgcgtatcttctgtaagatgagggttggcgtcatgtcataaacaaggcgataagttcagaaaaaggatgaaatatgccccggatagaatgcgttttttttgactgcgatggcacgctggtagatagcgaaaggctgtgctgcgaggcctatgtgctgatgtttgcccacttcggcattaccgtctcctatgacgagatgttcaagaaatacaagggcgcaaagctctacgaaattatcgacatcatcaaccgtcagcatgggctcgaaaaaaacaaagaagagatggaagtggttttccgcgagcacgttgcgcgtcttttcgatgaaaaactagtgccaatcgacggcgcgaaggccttgctctcggcgataaccgtgccgatgtgcgtggtttccaacggtccggtgaaaaaaatgcagcattcactcggattaaccggcctgttaccctttatggaaggccgactttacagcggatatgatctgcaacgctggaaacccgatcctgctttgctttaccatgcggctcaggaaatgcaggtgcctatcgcgtcatgcatattggtagaagactccgtagcgggcgttcaggcggggattgcggccaacatcccggtttattattactgcgcagatattcacaacccggccatcgaccatcctctggttaccgctttcacagatatgcatcagcttgccgctatctggcgagagaaaggctacaatatcgtcgaacaggacgcagtaatttgatttgtaactgtacttcgcaatagttactctttagaagacgacaaggttccttaaggagaagacgctgactagccaaagtccccagacaacggggcgaaaaaacgatccaataggcctcaagcagcgcatattcgacagtgcgctgaacgagtttgccgagtccggattaatgggcgcacggatggaaaacatcgcctcaaacgcggataccaccaaacgtatggtggtttatcactataaatcaaaagaagcgctctatatgcaggtgttggagcatgtttatcgctgcctgcgaaaacatgagcttgagctggacctttccgcttatcctcctgccgaagctattgttaaactggttgaagccagttttgattttcacgtatcgcacccggaatttattcgaatagtttcaaccgaaaacatgcttcgtggacgctttattcgtcaatccaccagcattcgggcattgaaccagacggcgctcactctgctggacgatattctcgaacgcgggaagaaaggccatctgttcaaagaagatgcgcaggcccgcgacgttcacagactgataagcagtctctgcgttcaccaggttgccaaccagtacaccttcggggcgctgtttgaaaatccggacgagtttgacacgcagaatgcgcactatcgccaactggcggtcatggtcgcgctgcggtatctgatgatttagtgataccagcggtagaaatgcaaacgcccgataagcagcttatcgggcgtttgttttaatgcgctcggccctcgggctttgcgcgatgaaattagctcttgtctgacttgtccgctttaccattcttgtcgcccgccagcagtttatccagcgcgtcgcccccgacgtgacggaagtcctgacctttgacgaagtagaaaatgatttcgcagatattctgacaacggtcgccgatgcgctcgatagaacgggcgcagaacaacgcggtcaaaatactcggaatttgacgtggatcttccatcatataggtcatcagctgacgcacgatgccctcatattcctgatcgaccttcctgtcttcgcgataaattctaatcgcttcatcgagatccatacgggcaaaggcatcgagcacgtcgtgcagcatctgcacggtgtggcgccccagcgactcgaggctgaccagcagcggctggtgcaggtgcgagaacttctcaagtgccgtacgacagattttatccgccacgtcaccgatacgttcaagctcggaaatagtcttgatgatggccatcaccatgcgtaaatcgctggcagtcggctgacgtttggcgatgatgcgcacgcaggcttcatcaatagccacttccatcatattgaccttgtcatcacctttaataacgcgctcggccagctcgccgtcctgattgtgcatcgcggtgatagcatcggtaagctgctgctccaccaggccgcccatcaccagaacctgagtacggatgtgctcgagctctgcgttgaactgggcagaaatgtgcttattgagattcagattgtccatcgtgctttcctctctgcctcgaagggcaatcaaccatagcggccagtaatgtagtcctcagtctgcttgcgggcaggtgaggtgaacaatgagtcagtgtcgctgtattcaatcagttcgccgagatacataaacgccgtacggtccgagcagcgtgccgcctgctgcatgttatgggtaacgataaccaccgtatagtcggattttaactcggtaatcaactcttcgatacgaccggtagagatagggtccagcgccgagcagggttcatccagcaacagaacgtcggggcgaatcgcaatcccacgcgcgatacacagacgctgttgctgccccccggagaggctgtaaccgctctggtgcagcttgtcttttgactcattccacagcgccgctttggtcagcgcccactgcacgcgctcgtccatgtcggtacgcgacagcttttcgaacagacgcacgccgaaggcgatgttgtcgtaaatcgacatcgggaacggcgttggcttctggaacaccatgccgaccttagcgcgcagcagtgcgatgtcctgcttatccaccaggatattttcgccgtcgagcagaatctcaccctcggctctctgttctggatacagctgatacatcttgttaaaggtacgcagaagcgtggatttaccacagccagacgggccgataaacgccgtcacttcatttttcgcaatatccagggagatgtttttcaacgcatggaatttgccgtaatagaaattcagatcgcggacctggattttactgttggatgcatcggtcattcgactcattaagacatctctctttaatcaatattttttgtaatcactgctttttcttggcgaaaatcacgcgagcaatgatattcagcagcagtacgcacacagtaatcagcaaaacgccggcccaggccatttgctgccattgcacaaacgggctcatggcgaatttaaatatggtgaccgggaggttggcgataggctgcatcaggtccgtgctccagaactggttggagagcgacgtgaacagcagcggcgcggtttcaccggcgatacgcgcaacggccagcagcacaccggtgataatccccgataccgacgccttaagcgtaatcgcagaaatcatcttccatttcggggtacccagcgcataggccgcctcacgcaggctgtccggcaccagtttgagcatgttttccgtggtgcggataacgataggaatctgcaacaacgccagcgcgacaatgcccgcccagccggagaagtgtcccatttttgcaaccacgatggtgtaaacaaacagacctacgacgatagagggtgccgacagcaggatatcgttgatgaagcggataacctcggccaacgcggatttacgtccgtattcggccagatacacccctgccataatgcccagcggcgtaccgataacggtagaccacagaatcaacaggccgctgcccgcgatggcatttgccaggccaccgccgtcggtgttgggcggcggagtattttgggtaaacagcgccagcgacatgccgtcgatgcctttggtcaccgtagtaaacaggatccacaccagccagaacaggccgaaaaccatggtcgccatcgacagcagcagcgcgatacggttcttggttctgcgccatgcctgacgcttacggcgtgattcaaacaacgctgcgttgctttgcatttcgagagttgccatcttaacgtccctcattcttggccagacgcagaatcatcagcttggaaagcgccaacacgataaaggtgatgacaaacagaatcaggccaagctccatcagcgccgaggtatgcaggccggaagacgcttcggcaaactcgttcgccagcgccgaggtaatactgttgcccggcatgtatagcgaggcactgtcgagctggtaggtgttaccgatgataaaggttaccgccatcgtctcacccagcgcacgccccagaccgagcataatgccaccgatgacgccgttcttagtaaacggcagaacgatgcgccagataacttcccaggtggtacagccgatgccgtaggcagactctttcatcatcaccggcgtctgctcaaacacgtcacgcataacggaagcgatgtaagggataatcatgatggcaaggataacgcccgccgccagaataccaataccaaatcccgggccggcaaacagcgcgccaacaataggaataccggaaagcacatcaccgaccggctgctggaagtaggtcgcaaacaaaggtgcgaagacgaacaggccccacatgccgtaaacgatactcgggatagcggccagcagttcgatggcgatacccagtggacgtttgagccagttaggtgccagttcggtcagaaacagcgagataccaaagctgacgggaacggcaatcaacagcgcaataatcgaggtcacgatcgttccgtaaatcggaaccagtgcgccgaactgctcgttgggaacgtcccaggttttattccacaggaaagagaaaccaaacttttccatgctaggcagggaagaaataaacagcgaaacgatgataccgccgagcagcaatagcgtaatcagcgcagccagttttaccagcgcgccgaagataatgtcaccgtttttgcttggtgctttgaaggacggcgttttttcagccataacactctcttcttattcagatttatttctctttcgacaagggttatcggcagagaatgagacagaagaccagtactttatatcacctgctatctcaaaccaaagtaattggcgccgtagcggggctacggcgccagaaacagaggcttagtagagggatttaccgctgctgtctttaacgttggtcttccaagctgtctggatttgagaaataacagactgcggcagggaggcgtaatccagaccggtcgtcagcttgtcaccatttttataggcccagtcgaagaacttcagaacttctgcgcccttggtggcatcctgctgctgcttgtagaccagaatgaaggtggtagaagagattggccatgcgttgtcacccttctggaaggtcaagtcctgagcaaaggtcttgctccagtctgcgcctttcgccgctgcgctgaacgactcttcagaaggggaaattgccttgccgctcgcatccaccagcttggtgtaagtcaggttgttctgtttggcgtaagcgtattcaacgtagccaattgagccaggcagacgctgtacaaacgcggctacgccgtcgttacctttgccgcccaggccggttggccagttaacggtggtgcctacgccaatctcttttttccagtcggcgttagctttggacaggtagctggtgaacacgaaagaggtgcctgaaccgtctgcacgacgaacgacagcgatattggtatcaggcagtttcacgcctgggttcagcttagtgatttccggatcgttccacttcttgattttacccaggtagatgtcacccagcgatttaccgtccagcgtcaactcaccggatttaatgcccgggatgttaacggccagcacaacgccaccgatcacggttgggaactggaacagaccgtttttctcgaggtcagcgtcgctcattggcgcgtctgatgcaccgaagtctacggttttagcgatgatctgcttgatgccacctgaagaaccgatgccctgatagttaacctgagcgcccgttgctttttgataggagtcagcccattttgcataaactggcgccgggaatgtaccgcctgcaccggtcagattagttgctgagaatgcagacattgctgttaaagaaaaagtcgctgccacaataccggcgacggtggtacgcatcagtttcatgttccactcctggtggttattatttgattcgactcatgtcgaagctgagtaaagtgtttagcacaggagcaaaataggacagtttggtgacagtaaaatgtaggttatatgacagttttgtgacagagggcaaattatgggcggtatcaggcgggtattggtttaaaaccgtctaatcatgcagattagacggttttaacggctaaaaatcatgcaggcttatcggcctttctttttacgaccgggttgaacaaaacgcttacgggaggcaccatttccgtctgatttttcagcagttttgagtccattttttggcccgttcaccgaaggtttcttaaccgccgccgcttttgatggcgcttttttcgccggcttgttgtcctcggaagaggaattttcaatcagtttgaacaactcgataagctcgtcgtccgttaagtcacgccattcacccagcggtaaccctttcagattgacgttcatgatgcgggtacgctcgagtttggtgacttcaaaaccaaagtgtttacacatgcggcgaatctggcgattaaggccctgcaccagcgtgatacgaaacacgaaaggcgcttctctcttcactttgcactttttggtcacggtgccaagcatcggcacaccggcgctcatgccctgaatgaattcgtcggtcaccggtttgttcacggttaccacgtactctttttcgtggttgttgccggcgcggaggatcttgttgaccagatcgccatggttggtcaggaaaatcagcccctgagagtccttatccagacgacctattgggaagacgcgcttgctgtggttaacgaaatcactaatgttatcccgctcgccctcttccatggtagtgatgatgccaaccggcttgttcagcgcaatcagcaccagatcttcttcatcacgcggctcgataagctgaccgttaactttgacgacgtccccggcgaaaacctgatcgcccacggcagcgcgtttgccgttgatgaaaacgttgccctgctcgacgtaacgatcggcatcgcgacgagaacagatgccgctctcgctaatgtatttgttaagacgaatagatgagctggtcaacttgataccttcgtaaaaaaaagcggactataccttatccacgttgggttgcgaagcctgtcgcggccgaattgtgcagagcggcatattgattggaaaatcttttaaaaaacatttttcccgaccgcaacctttccttttcgaccagcgaacctatggttaaggtcatcaggcgcgaacgcctgcctcacaatggagaaaatataatgcgtatgaaaagtacctttagcacgttggctgtcgctgcggttcttggactgtccctccccgtgacttccgcatttgccgccctgcaggtaggtgagaaagcccctgacttcaagcttagtgccgcgctggccggtaagccaaccaccttctcgttgcagcaggcactgaagaaagggcctgtggttctgtacttcttcccggccgccttcaccgcaggctgtacactggaagcacacgacttcgccgaagccaccgctgacttcgccaaacagggtgccacggtgattggtgtaactgccggtaacactgagcagattgccaaattctcccagctggaatgccgcgacaaattcaccgtcgccgccgatccaggggcgaaagtggccgcagaatacaagaacaccatgaatatattgggcaaaacgctgtctgaccgcacctcttatgtgattgcgccagacggtaaaatcctgctgagttacaccgataaaaacccggacgcgcacattcagaaagcgctcgacgcggttaaaaaatatcgtcaggccaatccggcttaactttcagacttaagtgggttcattatgctgactgccctcgccgccgccttcctgggtggcattattctcaacctaatgccgtgcgtgttcccggttatctcgctcaaagcgctgagcctgattcgccaccacgataaacccgcacaggccagagctgaaggtttggcgttcctgttcggcgtggtcgtcaccatgttcgcactggcgggcgtgctgttgctggcccgttccggcggtgcggcagtcggctggggattccagctccagtcgccgctggtgattgcgctgttggtgttggtgatgctggcgtcggcgctgaacctgttcgggctgtttgaagtcggactctcggtccaaaaggtgggtgaggtgggcggtgggcgaagcggtctgaccggttctgcgctgaccggcgcgctggcaattattgtcgcgacaccgtgcagcgcgccgtttatggccagcgctatcggctatgcgttaacgcagccgccaagggtcagcctggttatctttatcgcactggcccttggcttcgcggcaccttttacccttatctctttcttcccggtgctggcacgcatattacctgcgcccggcgcctggatggtgacgctgaaacacggcctggcgtttccgatgctcggtgccgtcgcctggctcatctgggtgctggagcgtcaggccggctcgatagcgctggctgctattctggcctgctgtatcctgctcagttttgcagcctggctgtatggcatggctcagaagcgcagaatgatgggaaaacgccactgggcgctgcacatcgccaccgccgtcttccttttgttagtggtgccgccgctggctaatctgaaaacatcgtccggtccgctagactcggcagaggcctcacaggcggccgccgcggtggcatggtcaccgcaaaacgtcgatgcgataaaaggacagggcaaacccatttttgtcgatttcaccgcctcatggtgtatcacctgccaggtgaatgaacgcacctcgctgtcgactcaggcggtcaaagccgcgatggcacgcaccaatactatttatatgatcgcagattcgaccaagtacaatccaaacgtcgaacaagcgctcagtgattttggccgcggcggcctaccgctttacgtggtctatccggcggacggcggcaaacccgtcattctgcctcaggtgctgacaccagggattgtcatcaccgcgctcgataacgcagcagaaagcggtaaaaaaacgtgaacacattgatgagtgaacgccatccagatgcaccgccccatgaaataaacgcaggcaatggcggaaactgacgtccgcgcgctgaagtggcctgctctaatggctcgcgctcagtcgggcgacagagcggcctacaaccagctattgaaagagatggttcctgccatccgaggttttgtgcgcaaaaaaatccgtgatgaagccctggtggaagacgtgattcaagaagcgctgctggcaattcatcgtgtgcgccatacctatgatccacagcggcctatcctgccctgggttgccgccatagcttcggcgcgggcgattgatgcactgcgccagcgaggacgtcgacaggaagtgcaggatgaagacgcgctgctgcattacccggctgtacgagaaggttcggacgccaatggacgggaggagcacgaagaattaaccggctatttaggcagtctgccgccgcgtcagcgcgagatggtggagtttgtgcacctgcgcgaacagagcctcgcgcagacggccgcagaaagtaatctctccgtctcggcggtcaagtctctattgcatcgcgcgatgctcaaccttcgtcaatatgggaacggtaatcgtgagaaatcatgacctgttgatcgacaaactcagcgacacggcaaagccggtgaaacgcgtctggcctacccgctggcgcgtcgtcgcctggattattgccgtgctgccctgcggtacgctcaccagctgggcactgcacaatagatttaccgactggtcacaggcgggcgccgttccggcgctggtcgcgctgctgctgtcttttatcatcggagccagcgccatggccgccgcctttactctcagcatcgccgggcgtcagccactgaggctaaaatgggcagcgctgctcgccgtgctctggctgggggtcaatctgctcaacatgtcccctccagcacgttaaaagtgggcgaaggcgtgcactgttatctgtttatgctgctggccagcctgccgatgatcgttatctcgatagccagcctgcaccgcacgcgttcgctttaccccggtaaaacgctggccctggcggggtgcgggatcgccttcatgtgctcaatgctgctgtcgctgtgccacgaggtccatcttcaccggtttgacttcgctatgcatctcacggcgggtttgagcatcatcattctcaccgtgcttgcgggccgcaggtgggtcagactgagttaatgcgcgagtgcggcatcccccagagattcggtgatggtgtttagcatattgtccgggctgtatttatagagcaggtcagggtccagcggcaccgggttaccggctaaaaatgccgagatttcctgccactctctactacccagaataaaaacacgctcaggagaataaaactcggaatgggctagctcggcgttattggtgatcactttcttgttaaggaaaatggcctccagtatgcgcagcgtaaaaccggtttgtccctgctgaacaatatcgaccaccacatccgacatcaccgtttttaagaaactgtaggaatactcaaactcctgatcgacgtaataaggggattcaccctgtgaggtcttgtctttaacaattgaaaagtcgatttcgcaccctgccttttctaaacgctcagccagctgggtgagataggctatgcgacccttatcgcgtccgaggaagaaacatcttggctgccgggcttctaatttaaacgcatcataggttttggcctctttgtagcccacgggaagaaactgcgggagatagtcaacgcccagttccagggacctaccctcttcaaaagtataaattttatcaaataacgaggcggcactgtctacgaattcgcgagaaaccgggttgcgtaacaagaggatttttttgcaatccaggtgcttaatgacgtccttgttaaccccaaagaaaatattgctgtcatgcgtgataagcaggtcatcgcttttgatgtcatttaattttttagcaatgtgggatttagctatccgcgaggacgtaaggcctaaaaatttaaatttctgatgcagtctatggatctttcttggtgtaaaaacgtttttaactccataatttttaaccaaataacgaaccatcgtttgttcgtaactcgttgaccagttgaaaaaataaacgttcatattatccctgactaaaaattataaattcttattccagcgatttttaaggagcgcagtcataaaaaagtccggcacgctgcgagagcataaccggactttttactgaccgagggcctgttactctacggtaacggatttcgccaggttacgcggctgatcgacatccgtgcctttgataagcgcgacatgatacgacagcaactgtagcggaacggtgtaaaaaatcggggccacaatctcttcaacgtgcggcagctgaatgatcttcataccctcgctatcggtgaaaccggcgtcctgatcggcgaacacgtacagctgaccgccgcgtgcgcgcacttcttcgatattggacttcagtttttccagaagttcattatttggtgcaaccacgatgaccggcatatcggcatcgatcagcgccagtggtccgtgcttcagttcaccggcggcataggcttctgcgtgaatgtaggaaacttccttcagcttcagcgcaccttccatcgctatcggatactgatcgccgcgaccgaggaacagcgcatggtgcttgtctgagaatccttcggccagcgattcaatggttttatccagcgacagcatctgttcaatgcgcgcaggaagcgcctgcagcccgtgaacgatttcatgctcaacctgctcgctcatgcctttcaaacggccaacgcgcgccaccagcatcagcagaacggtcagctgagtggtgaaagccttggtcgatgccacgccgatttccgtgccagccttagtcatcagcgcgaggtcagattcacgcaccagtgaagagccggctacgttacacacggccagcgaccctaaatagcccagctctttggaaagacgcagcgcagccagcgtatccgcagtttcacccgactgagacagcgtgatgatgaggctgcctgggcggacggcggatttacgatagcggaattcggaggctatctcgacgtcgcacggcacaccggccagagcttcgaaccagtagcgcgcgaccatacccgagtgataggacgtcccgcaggcaataatctgcacgtgctgcactttagccagcagcgcgtcggcgtcaggacccagttcgctcaggttgatctggccgtggttaaaacgcccttcgagggtgtttttaatcgcctgcggctgttcgtagatctctttttgcatgtagtgacggtacgcgcctttatcgccagcgtcgtactgcaccttagattcaatttctgggcgctcaaccgccttgccgtgtttgtcgaacacattgacttcacggcgtttgatttcggccacgtcaccttcttcaaggaacatgaaacgacgagtcacgggcagcagcgccagctggtcggaagcgataaagttttcacccacaccacgaccaatcaccagcggactgccagagcgtgcggccaccagcaccgagggatcgcgctggtccatcaccacggtgccgtaagcgccacgcagttgaggaatgacgcgaagtacggcttcgagcagcgtaccgccctgcagcagttcccagtgcaccaggtgcgcgataacttcggtatctgtctgagactcgaaacggtaaccacgctcgatcagcagaacgcgcagcggctcaaagttttcgataataccgttatgcaccacggcgatgtagtcagacacgtgcgggtgggcatttgcctcggacggttcgccgtgcgttgcccaacgggtgtgggcaataccggtgccgccgtgcagcggatgcgcgtccagtgcatctgccagcacctgtactttgcccaggcgacgcaggcgtcccatatggccttcgttatccacaacggccagaccggcagagtcatagccgcggtattccagacggcgtaatccttccaacagaatttcagcaatatcgcgttgcgctactgcgccaacaattccacacatcggttttattcctatagaaggtctgttcacagaccttttttgatgccttaacctgattgatatccgctacggtcgtgccgcgcgggttccccgagccttgtagagagttggggattattatgttttgcactggccatgacgtggcgacgaacagtgcaaaacacaattgtaagcctcaataaatcaggtgcagcgaactgcacccgttttattctcacttaagattctagcttaagcctttcttttcaccggacgtttccagtcaggcttgtgtacctgagtgacgcgactgataaccaaaccgccttcaggcacatcgcgggcgagggtagtgcccgccgcaatggtcacgtcgttgccaacgcggaccggcgcgataagctgggtatcggaccccacgaagacgttatcaccaataatagtctgcgacttgttcacgccgtcatagttgcaggtaatggtgcctgcgccaatattcacgttatcgccaatcgtcgcgtcgcccaaatagctgaggtgaccggccttggtgcctgcgccgaggctggctttcttaatctcgacgaagttgccgacgtgcgcagcctggcccagttcggcccctggacgcaaacgtgcgaaaggaccgacggtgcagtctgccagcaaggtagcgccttcgaacacgctgtaagggctaatgacacagtcgtcaccaatgacgcagtctttcagcacacagcctgcgccaatcaccacgcggtcccccagcttgaccctaccttcaatgaccacgttgacgtcaatgctcacgtcgataccatgcgacagctcgccgcgcagatcaaagcgagcggggtccatcagcatcacgccttccagcagcagacgctcggcctgttcctgctgataaacacgctcaaggcgggaaagctgaagacgattgtttacgccttcgacctcactcagtcgagcgggatgcacggtggcaatcttgtggccttcggcgtgcgccatcgcgatgatgtcggtgatgtaatattcaccctgcgcattgttgttcgagagtttgttcaaccagcgcttgaacgaggccccgttggcaaccagaatgccggtgttgatttcattgattttcagctgctcggccgaggcatctttctgttcgatgataccgacgacttcgccattttcgcgcacgatacggccatatccggtcggatcgtcaagcttgacggtcagcagaccaataccgccctcgggcttcgcggccaacagctttttcagcgtatcgacggagataagcggcacgtcgccgtaaagcatcaatacgtcttcgtcatcggagaaatgcagtgctgcctgctgcatggcgtgcccggtacccaactgctcggcctgcaacacccagttcagctcgctggctgcgaggctctgcttgagcaactcaccgccgtggccgtaaaccaggtgaacgttgttggcgccgacgcgggttgcagcatcgataacgtgctgaaccatcgattttccggcgagcggatgcagtaccttgggaagattggagtacatacgtgtgcccttgcctgcggcgaggatcacgacacttaatgcgctgttagacataggcaacctgacaaattcagtttgattgataaaagtaacccgttagccggtcagattactacatatttttcaataaaaactacccacaagccgcacggggcaagggttgaacactctgtaagcgacgcgaaaagaaacgcctcaaaactgtcatcattagtagacagtattccattgaaacggcatgaattgaatgaagaagatgccgaaaaatgggcttttttaaaggtaaaaaaaagcgacccgaaggtcgcttttcaattggcagtgcttttgtgactaatgcggcgttcgccgatcagtaacccgctttcctggtcagttcgataacgcgaagtttcgcgatcgctttagccagttctgccgacgcctgagcatagtcgacgtcgccgtgagaaccgttgatgtgttcttccgctttgcgcttagcttcaagcgcgcgcgcttcgtcgaggtctaccccacggattgcagtgtcagccaacacggtcgacgcgttcggttgcacctcaaggatgcctccggagagatagatatactcttcttcgccgtgttctttaacaatgcgcaccatgccaggcttgatggcggtgagcagcggggcgtggccagggaaaatacccagctcaccttcgctacccgtcacctggattttctgcaccaggccagagaacattctcttttccgcgctgacaacatccagatggtaagttttttcagccatgtcaccttcctctcttaatactgtaacgatcgttatcccctaagggagaacattacagttttttggctttttccacggcttcttcgattgcgccaaccatgtagaacgcttgttctggcaggtggtcgtagtcgccttcgataatgcctttgaaaccacgaatggtgtctttcagcggtacgaatttgcctggagcgccggtaaatacttcagcaacgaagaatggctgtgacaggaagcgctggattttacgcgcgcgagatacaaccagcttgtcttcttcagacagctcgtccatacccagaatcgcgatgatatctttcagctcctggtaacgttgcagaatagactgcacgccacgcgccacgtcatagtgctcttgacctacgaccagcggatcaagctgacggctggttgagtcaaggggatctaccgctgggtagatacccagagaggctatctgacggctcagtaccacggtcgcatccaagtgggcgaaggtggtggctggagatgggtcagtcaagtcatccgcaggaacgtaaacggcctgaacagaggtgattgaaccgtctttggtagaggtgatacgctcttgcagagcacccatctcttccgccagcgttggctgataacctaccgctgatggcatacggcccagaagtgcagacacttcggtaccggccaaggtgtaacggtagatgttatcgatgaacagcagaacgtcacgaccttcatcacggaatttctccgccatggtcaggccagtcagtgctacgcgcagacggttacccggtggctcgttcatctgaccgtaaaccagtgcaactttgtcgataacgttggagtcagtcatctcgtggtagaagtcgttaccctcacgagtacgttcacccacgcctgcaaacacagagaaacctgagtgctcagccgcgatgttacggataagctccatcatgtttacagttttacctacaccagcaccaccgaacaggccgactttaccgcccttggcgaacggacacatcaggtccattaccttgataccggtttccagcagttcctgggagtttgccagctcttcgtaagaaggagcagcacggtgaataccacggcgttcttcttcgccgatttcacctttcatgtcgattggttcacccaatacgttcatgatgcgacccagagtcgcagtacctactggtacttcgattgggtgttgcaggttgttcactttcagaccgcgacgcaggccgtctgaggtacccattgcgatacagcgaacaacgccaccgccgatctgttgctgaacttcaagcaccagcttggaggtaccgttttctacctcaagagcagtgtacactttcggtactgcatcctgagggaactcgacgtccaccacggcgccgattacctggataatctttccagtagccatcttgaatcctctacgtaattcgtaaacctagcttaaaccgcggaggctcccccgacgatctcggtgagttcctgagtgatgctggcctgacgagctttgttgtataccaactgcagctctttgatcaggctgccgccgttatcggtggcggctttcatcgctaccattcgcgcggcctgttcgctggccaggttttctacgacgccctgataaacctgagactctacatagcgacgcagaagggtatccaacagcgctttagggtctggctcatacaggtaatcccaggacttcttcgccaactcgccggtttcttccgcaggcggaagtggcagcagttgcacgattcttggttcctgagacatggtattgacgaatttgttgctaacaatgcacagcttgtctaaacgaccttcatcgtaggcttgcagcatcactgctaccggaccgatcagttctgacagggaagggttatcccccatgccagttacttgggcaaccacgttgccacccacggaaccgaagaaagatgcggcttttgaaccgatcagggccaagtcaacctcgacgccttgctcgctcaaacctttcatctctgtcagcagtttcttgaacaggttagtgttcaaaccaccacagagaccgcgatcggtagacacgaccaaatacccaacgcgcttaattttacgctcgtccaggtatgggtgcttatattccagattgcctaacgcaaggtgacctatcactttacgaatggtatctgcataaggacggctggccgccatgcgttcctgcgttttacgcattttggaggcggcgaccatttccatcgctttagtgatcttttgcgtattttgtacgctaccgatcttactacgtatctcttttccgccggccatctctgcttctcctcattactaactgtcctaccgcgttagcagtaggacagttcagtattaccaggactgggttgctttgaaggtttcgaggatagattggaatttaccctcgatttccttgtcgtacgcaccagtttggttgatttgttgcatcagctcgccgtgctcgcggtcagcgtaagccaacagcgcagcttcgaagctacccactttggacagctcaacgtcttccaggaaaccacgttctgcagcgaacagaatcagagactgcgcaacgatagacattggcgcgtactgtttctgtttcagcagttcggtcactttctgaccgtggttcagctgtttacgtgtagcttcatccaggtcggatgcaaactgagagaacgcagccagttcacgatactgtgccagagcggtacggataccaccggacagttttttcatgatcttggtctgagcagcaccaccaacacgggatacggagatacccgggttaacggctggacgaataccggagttgaacaggcttgattccaggaagatctgaccatcggtaatagaaattacgttggtcggaacgaacgcggaaacgtcgccagcttgagtctcgataatcggcagtgcagtcagagagccggttttacctttcacttcacctttggtgaatgtttcaacgtaatctgcgctaacgcgagatgcacgctccagcaaacgggagtggaggtagaacacgtcacctgggtacgcttcacggcctggcggacgacgcaacagcagggagatctgacggtaagcaacagcctgtttagacaagtcatcgtatacgatcagtgcatcttcaccgcggtcacggaagtattcacccatcgcgcaaccagagtatggtgccaggtattgcagcgcagctgattcagatgcagttgcaacaacaacgatggtgttagccagtgcgccgtgctcttccagtttgcgaaccacgttggaaacggtggaagctttctgaccgatagcgacgtaaatacatttaataccggaatcgcgctggttgatgatggcatcaattgccagagcggttttaccggtttgacggtcaccgattaccagttcacgctggccacgaccgattgggatcatggcatctactgacttgtagccagtctgaacaggttcgtcaacggattgacgatcgataacgcccggtgcgatagcttctacaggagagaaaccgtcgttatcaaccggacctttaccatcaattggggcacccagggtgttaaccacacggcccagcaggccacggccaactggaacttccaggatacgacccgtacattttactttcatgccttcggcgaggtcagcgtaagggcccattacaacggcacctacggagtcgcgctccaggttcagggcgatagcgtagcggttacccggcagcgcaatcatttcgccttgcatgacttcggccaggccgttcacgcggatgatcccgtcagagacggaaacgatagtaccttcattgtgagcttcgctcaccacattgaactgagcaatgcgctgcttgatcagttcgctgatttcggtggaattcagttgcatgctccagtccccttaagactgcaagacgtctgccaggcgttcaagacgactgcgaacgctgccatcaatcaccatatcacctgcacggattacgatcccggcaagaacagacttgtcaattttgcaattcagcttaactttgcgagacaaacgtttttccatcgcagcagcgattttcgcctgctgttcttcagacagaacgttggcagaagtgacttctacttcaacggtcgactccagtgctgcacgcagttcgatgaactgttccagcacttcaggaagaacgcgtaaacgtttgttgtcagccataaccttaatcaggttctgacccgcttcgtcgagttgttcaccacatacgccgataaacgttttagaaagagcttcaggcgctaatgcaccggtaagcaattctgcaatctgtttatcgcgtgtgacttcagccgtgaacgcgagcattgactgccagcgatccaagctttggtgctcaacggcaaagtcaaaagctgctttggcgtaggggcgagctaccgtagtaaattgtgacatcagcccctccctccttacagttcagcgaccagtttatcaacgatgtcgctgttagcagcttcatccacggaacgttcgatgattttctcggcgccagcaatggccaaaataccgacttgtttacgtaactcttcacgagcacgttgacgttctgcgtcgatctctgccttcgcttgcgtcacgattctgttacgttcctgctcagcttcagttttagcttcgtcgatgatctgagttctgcgcttgttggcttgctcaatgatcacctgggcttccgctttggctttaatcagttggtcggtcgcatcggcttgcgctaaatccagctcttttttggcttgttctgcggaagataaaccgtcagcaatttctttctgacgcttttcgatggcagccataattggcggccatacgtacttcatgcagaaccagacaaacaggacgaacgcgatagcctggccgaggattgttgcgttaagattcacagcacaatgcctctttcaaagtgaattagttgatgtcagtcgtttaactcagagcgaactctgtgttaggcgacagcaaacatcacgtacagacccagaccaacagcgatcatcgggatggcgtcgaccagacccataacgataaagaactgtgtacgcagcagaggaatcaggtcaggctgacgagcagcgccttccaagaatttaccacccaggatgccgataccgatcgcagcaccgattgccgccaggcccatcatcacagcggcagccatgtacagcagatccatactcaggttttccatgacagtctccagtttgtttcagttaaaacgcagtattgttgaaagaaaaatcagtgtttttcagatgccatcgacagatagacaatcgtcagaaccatgaagataaaggcttgcagtgtaatgatcaggatgtggaaaatggcccaaggcacacttagaatccactgtgaccaccacggcagcaggccagcaataaggatgaagatcaactcacccgcatacatattgccaaacagtcgcagacccagtgaaactggtttggacagcaggctgacgccctcaagaatcaggttaatcggaatgaaaaccggatgattgaagggttgcattgtcagttccttaacgaaaccgccaacgcctttcatcttaatgctatagaaaagaatcaaaatgaatacgccaagagccatcgacaacgtaatgtttacgtcggcggtaggcacaactcgcagagctggcaaaccgagaacatgctcgccaatgtatggcagcaagtcgataggcagcaaatccatcaggttcatcaagaacacccagacgaacacagtcagtgcgagaggcgcgatcactttgcttttgccgtgatacatgtcacgcacgctgccgtcgacgaaaccaacaaccagctctacagccgtttgcagtttaccgggaacaccactggtggcgtttttggcgacgcgatggaaaataaccaaaaagagtaccccgaggaccacggagaaaaacatcgaatcgatgttaatcgaccagaatcccgtcccaacctgaagctgtgtcagatggtgaccgatatactcttgtggagtagagatttctcctgatgcagacatgatgcctcttaccctttagtagttaagtacggttatctacggttacgaccgattaattacggccggagctactatctgcgtgattagcacagataaataggccaaacccaacggagcaaaagcagccttgaacaggcccagcgcgataaccagcaaagttatggtaaccacaactttcagcgcttctccaatggcaaaagaccaggcaactcgtccagagaccgttgtttgcgcctgttggcgccacgcatacagcataaacagtgcattaggtaaccaggcggccattcccccataagagcagaagtcgaccacgacaggcttttaaaacccaacgctgcactgagaaggacaaacgtcaatagctgcagtattaacagctttctcgctactttcccgccgttcttatcgtataaggagtaagacacagacatgacgtttattctctcgtacctaactggaggtatgctgaatgccgtataacactgcctttacccaaaggagtcaagcagcaaaaaacgtgcaaattatacgggccactcaaacgaattcaatggataagtagcgaaaaggtgaacaattatttaaattgacctttttagagctattttcataaggaaactatagcgctaattaactacaaatcggctgtcgagttattccattaaccgacaaagaagcgtgcgcgggatcacaaaaaaccgttttccacgccattttctctgccgcgttgggattgctattatctaatagatattttaaaaaatcattaaaaacagtagcttaattgattcagcttttcataaaaaatcaaatctaaattaaaagtttgctttttatacatacccacaacaaataacaacaatttgatcacaattcgaatattgaccacttaagacaaattcaatttcaaaagtgattatttcgccttggattaaagctaaaacgtcaatcagctgatgccagtctgtaaaacacaggtaaaaagcgaataaatgtacaaactacttagcttgcttatttttacctttattaaacatctgacttttgaagattttattgacgtaaaacaaacttagtttgccttcaaaatcaccagatgcctttcgccatccaattccggcacacgcagttttataatctcttgcagctggataccctgcggtagcgtggctaattcgtcatcaggacgcagtcccttcagcgcataaaaacggccctcccctttcaccggcaaatgatggcaccaggacaacatgtcctgcagcgacgcaaacgcacggctgatgacaccgtcaaaagcaggctcaggaatgaactcctccaccctgctctgcaccggctcgacgtttttcaggccaagctcgtgctgtacctgacgcaggaagcgcacgcgctttcctaggctatcgagcaatgtgaaatgagagtctggacggataatcgccaacggaatgcctggcagtcctggaccggttcccacgtcgatgaagcgtgagccttccagatgcgggttcaccatgatgctatcgaggatatgacgcaccagcatttgcatcgggtcacgtaccgaggtgagattgtaggctttgttccacttatgcagtaactcgacatagccaatcagctgatgtttttgttgatcgggtagcgctattcctgccgcggcaagcagcgagtccaatttcttttgcatgggttatccttgacgaaatcaaaacccgcaggccctgtcgctatgacaggacctgcggcgtggccaaatcaggcgctgcgacgcagcagaccctgtttcttcagccaaacgagaagtatcgagattgcagccggggtaatacccgaaatgcgagtagcctgcccgatcgaggttgggcgatgatcgttcagcttggcaataacttcgttcgacaggccgttaacctgacgataatccagtgtttcaggcagcagcgtgttttcgttacgctgttgcttttcgatctcttcctgctgacgcgcgatgtagccttcgtacttgacctgaatctcgacctgttcggctgcctgagggtcgcttaccgctggagcaaaggcttcaagacgggtcagcaggtcgtacgtcatctctgggcgacgcagcagctcttccgcgctggcttctttggacaatggcgcagacaggttggcgttgatctctgcaacctgtgcgtgatttgggttgacccagatcccgcgcaggcgttggcgctcaagctcaatcatttcgagtttttcgctgaagcgtgcccaacgtgcgtcatcaaccagacccagttcgcggcctttttcggtcaggcgcaggtcggcgttgtcttcgcgcagcatcagacggtattcggcacgtgaggtaaacatgcggtacggttctttggtacccagcgtgcacaggtcgtcgaccagcacgcccagataggcctggtcacgacgtggtgcccaaccttcctgttcggtcgcgtggcgtgccgcattgagacccgcaagcaggccctgcgccgcagcttcttcgtaaccggtcgtgccgttgatttgtccagcaaagaacagacctgggataaatttgctttccagcgtcggtttcaaatcacgcgggtcgaagaaatcgtactcgatggcgtagccaggtcgaacgataaccgcgttttccatcccctgcattgaacgaacgatctgcatctgaacgtcaaacggcaggctggtggagataccgttaggataaatttcgttgctggtcaggccttcaggttcaaggaagatctggtgtgcgttacgatctgcaaagcgcatgactttgtcttcgatagatgggcaatagcgtgggccgatcccttcgatgatcccggcatacatcgggctgcgatccagattattgcggatcacgtcatgcgttttttcgttagtgtgcgtgatatagcaaggtatttggcgtggatgttgcgccgcattacccatgaacgagaacaccggtgccacgtcgtcgccgtgctgctgaccaagtacgctgaaatcgatggtacgcgcgtcgatacgcggcggagtcccggttttcaggcgattaacgcgcaaaggcagttcacgcagacgttgtgaaagtgagattgccggcggatcgccagcacggccaccgctgtagttttcgagaccgatgtggattttcccgtcaaggaaggtacccacggtcaacaccacggctttggcacggaatttaaggcccatctgggtcacagcgccgaccacacgatcgttttcgacgatcaggtcttcaacaggctgctggaagatcatcagattaggctggttttcaagcgcggtacgcacggcttggcggtaaagtacgcggtctgcctgagcacgagtggctcgaacagcgggtcctttgctcgcgtttagtatcctaaactggatgcctgcgtgatcgattgccgttgccatcaaaccaccgagtgcgtccacttctttaaccagatgtcctttcccgatcccgccaatggcagggttacacgacatctgtcccagcgtgtcgatattatgggtcaataacagagtttgacgtcccattctggctgaagccatggccgcttcagtgcctgcatggccgccaccgatgatgatgacgtcaaattgatccggataaaacatggtactgcacctcgaagttcaacgaacgatcgtattgcgttgggaaaacggattctacgcgagtttagaggttccacaagccccaggggatcgtcactaattaaaagaagatctttttatttaaagatctcttactactaactcttattaggatcgcgatcctctgtgtataagtcattattgtctatttagatcaatatgctatagaggatctaatgctgtgaatgatcggtgatcctagccagtataagctgggatctaaatggcaagttatgcacagcaccgaaagcggtctagggttgttagagggataactaccggtttcacaccggtttaaagcctagttatccacatctgatcgcgtaaaatttacacttatctgagcaaattaatccaatttagtgcccaaacctcagccggatcttcaggaatttcgtgctgagtgacgtcgatctcaaggcgatcgccaattctttgagcacctaatgccgtcagtttttgatccagagtacggatagcaccacagaaagtgtcatattcactgctgcctaaaccgagcgcgccaaagcggacattagaaagatcgggctgctgttcttctatttgctcaagaagaggctgaagattgtcaggaagctctccggcaccgtgcgttgaacagaccaccagccaaataccttcggttggaagttcatacagctcaggtccgtggaacagttcagtagaaaaccccgcttctttaagcttctcttctacatgttcagcgacatattcagcgctgccaagcgtactgccactgatcagggtgatgtcagacataaggctcttacccgaaaaaagaatggctattgtacgctgtgaatcagctgggatctacctgtggataataaggtattaaaatttattactcagggctggatcgtacgcatgatcgggttctgtaaggagattaaggtttcggttgactgaatctcttcaatcgtctggatcttgttgataagtacctgttgcagcgcatctatcgatcggcacatgaccttgatgaaaatgctgtaatggccggtggtgtagtaggcttccaccacttcttcgaggctttccaggcgtttgagggccgagggatagtctttggcgctcttaagaataataccgataaaacaacatacgtcgtagcccagacgcttgggatcgacgttaacgcgggtccccgtgatgatccccgcctgcttcatcttctcgacgcgaacgtgaatggtgccggggctgacgttgaacgattttgccagttcggcataggctatgcgggcgttttccatcaacgcgttgagtatcccacggtctagggcgtctatcagataggtttcggacatcgattagtttctcaattaaggacgcttccatcgtcgttgtacacggcttttcattccagtatcaaagcgccaaatatggtcaaagatacgcataattgccggtttaccatagtgtgacatcgccagcgcatgaaaacgatgacgatggtcggtttgctgtttcctgacccgctgctgaatgtcatccggtaaacgctgggcaataaagtcagagattatcaccgcatcggcatcgtgccactccggcgtggccagtttgtctagcgttgcgctcaggcaggctgaaagatcggtgccgccgcggaaatgctgcccaggaaacgcatcgcctgatcgagtccgctggaggaggtcagctcatagtggataacttcgctggcgaataacatgatgtagcagcggcggttatcggccagcgctatgcgcagcaatgccagacagaaggcttttgcgcactgctcgttgaatccacccatcgaccctgaggtatcgacgcagaccacaaacggcccacgcggctggggttcgacctgttgataaaccaccggcttcatgaccaccttctctcgccacacgtcgccctgcagccgataggtcatcagccgtttctccagcaggcggcggtagaactctatctcaagctcgggaatgccgagggtggccaattcaggcggcaataggcgaagaatgtcgtcgctctgatgaatgccgttgacctcttccggcaccgtcgccggttcgcgcaccattaaacgatgtggctcgaggatcgtttcctcatggggattggctttcgcggtctgactgcggcccagctgttcggccagctgttgcagttccggctgctgctgcaaaaaggtgccatagcgtaccagcgactgataatcgccgcgctggcgccttcctttactcatgtcccaaagacgccccgccgccgcgtcgttttctgctaataaaggggagagttcgccgctgagctccagccgctgctcgagttcgttttgtagctgttcctgttcctgctccagaaggtgatgatgcagcgtgacggtctggaaggtgatattcagccgccagcgctgcataaacagcccttgaaagctgacgctatcggaggaagacacgttgcctgcgagcgaacgcgcctcggtggcaaagggagaattgagctgctcgagctgacttacggtctcttccagctcggtgtgaaaggtggactggctgctctgctgacagtgctgataaaggtagaactctttcgccagatcgttaggcacttccgtttcgtggatcctttgctggagtcgaaagcgccactcgggaagatctttggtcagcgctcgtttgaggcgcgggaatttctcgaagaaaatctgcagctcaggcgttgccaacagcgcgatgatcagttcatctattatctcggcttcctggatagccagcatcacgtccagcgtttcgagagtaaacatatttaccctctgctaaacaactgctgctgctgcatcagttgctcgttgacgcgaatcaggctggcctcgatttttgccgtccattctagcggcacaaacaggcacggatgatgctggttaaactgctggcgctgttgagtcagcatctcgcctatcgccgacagcgtattcttcatctcttggggtacgctgatgtgctcgttgcccggcagcgtcaggaagcttgcctggcggctcctgtcgaaaatcaccagctgcagcttctcatcaacctctacgtctactgcctgagcaaaaccgatgccgttgagcttggctcttaattggcctcctttattaagccattcagcaatcatgtctcgctccaccagcacgtgggtcacctgaatatcatgcagatgcagcggctgttgcaggaacagcgtcaggctggtggcggaaagcgcttcaggaagttgatactgaggcctgcggctgaacatacctgattttttactgacttttagcgcctgacgcgtgctctgctgctgttgatactggttccactgctgattgagttgctgaattttcaaacttaaggtttgctgctgataggcctgttcggtaatgctttgttctatctgcgtttgtaacaaatgataagtactcatgtcatgccacaggcaatctttgagcaagataaggtctaccggcgacaccgactgcctgccgctgaaaaacgcgcacgcctgtagcaatctcagggctttcttccaacgacggtccgaaacgtaggggcagaatcgagtgcaccgagccgttgacgcagttggaaaatcagttcaaagccgtgttcagtcaaattgactttttcaatctcatgctgccattgttggtactcttcgttgctgatgctgagaccttcggcaacgggatgcgtgttttcagaatggcggctggtcagcaaggaacggaagttctgtttgtcctgaacgcggtcgagccacaggcggatgagcatgcggtcatacaaggcctcaagaccgccatccgcttcaggcagttcgttggaggcgcttatcagcaaacgcatcgggatagcttcttctatatcgccgttgcgaaaacgcctttcattgatggcggtcagcagcgtgttgaggatagccggtccggctttccagatttcgtcgagaaacacaatttctgcttcgggtagatagccctgcgtgaggcgcaggtagcggccttcatcctttaatgcttggatggaaagcgggccgaacacctcttcagggtggaaaagcgggtcatcaggtattcgaatgcgcgagcgtcacgaaacgcatatttcaggcggcgagctatcaggctttttgctatcccgggcggacccagtaaaaatacgctttcaccacacagcgcagccagcaggcaaagtcgtatagcttcctgccgctcgtaaaggccgttttctaacgcattagccagtcgggtgattcgttctgccaagagaggtgattgcgccataatgtgttttgaactgccccaaatagtgacttaagtgatggaatagtggactgcaagccgataataaaccatgattttttttggcgatatagcttgttgattcttaaaatctttctatttgctgaaatgtgatcgtctcggatgaattgttcacttgtctttgtattaaagggtaggcaatcttatttattcgtgcatactgtgcgccttttggtgggtttaaaggaactgccaacccacgtagcttacgaattttgggcaacggatttttagccaaatactcaagtcagccaaatgacaaagcataaaagaaaccaattatgagcacagaacataaacggtcactccccgcagtaaccttggccgctatcggtgtggtttacggtgacataggtaccagccctctttatacactgcgagagtgtttttcgggtcactacggatttagtgtcgaacccagcgtggtttatggtttcctctccctgattttctggctgctggtcattgtcgtatcggccaagtatctctctttcgttttacgtgcagacaacgccggtgaaggcggtatccttaccctgatgtctttggccggtagaaatacctcggcacgagccacggcgatactggttattctaggcctgataggcggcagtttcttctacggcgaggtggtgattaccctgcgatgtcggtgctttccgcgatggaaggtctcgaaattgccgcgcccaatcttgatgcctatatcgttcccctgtctatcgccgttctgaccctgctgttctgtattcaaaaacacggtaccggactggtgggcaagctttttgcgcccgttatgctgctgtggttcatggtgctggccgtactcggccttaacagcatcattcataaccctgaagtcctgcgcgccatcaatcctgtgtgggcgttcaacttcttcctggaccataagtctttcgccttcctggcactgggagcggtggtactgtcgattaccggggttgaagcgctgtatgccgatatgggccacttcggaaaaatgccgattcgcctggcgtggtttagcgtcgttctgccttcgctggtattgaattacttcggtcagggcgcgctattgctcaagaatcccgaagcgattaaaaacccgttcttccttttggcgccagactgggcgctgctgccgatgcttatcctggcgaccttggctaccatcatcgcttcgcaggccgttatctcaggcgtgttctcactgacgcgtcaggcggttcgcctgggttatctgccgccgatgcgcatcatccacacctccgaaatggaagccggtcagatttacgtgccggtcatcaactggatgctctatttcgctgtggtggtggttatcctcggcttcgaacattcgagtaatctggccgcggcctacggtatcgcggtaactggaaccatggtactgaccactatcttatcgtgcaccgtggcgtacaaaaactggcattggaaaggcttcatcgtggccgtgctggccgtggtgcttctgtttatcgacgtgccgctgttcgccgccaacgctaccaagatcctctccggtggttggctgccgctggtgctggcgctgatgatgtttgtggtgatgaccacctggaagagcgagcgtttccgccttatgcgccgcatgcatgagcacggtaactctctcgaggcgatgatagcctcactcgagaaatcgccgccggtacgtgtgccggggactgcggtttatatgtctcgcgctataaacgtcattccttttgcgctgttgcacaacctcaagcataacaaagtgttgcacgagcgcgtggtgttgctgacgctgcgcactgaagatgcgccctatgtgcataacgttcgccgcgtgaccatcgagcagatgtcgccgaccttctggcgcgtggtggcaagctacggcttcaaagagaccccgaacgttgaagaagtgttccaccgctgtggcctcgaaggcctgtcgtgccgcatgatggaaacctcgtttttcatgtcgcatgagtcgctgattctgaccaagcgtccctggtatctctacttccgcggcaaactgtttatcgccctgagccgtaacgccctgcgtgcaccggaccagttcgaaatccccctaaccgcgtgattgagctcggaactcaggtcgagatatagggtttcatcatcaaataaagagaaaacgccgcagtccacaaacctgcggcgtttttgttttcctccgcgttacgctcgcccatctgttttattccacttaagttaaaccgctgtttacctgccatcgaaacgtttcgacggcgatcacaaattcaccttctgctcattgccagcgcgtacgaattttctagaatcaaccgcgagcgaaacgtttcgctgtcggagctgataatgaaaaaagccaagttgttgaacgccgaagtttcacaggttattgccagtctgggtcataccgacagcctgacgattgccgatgccggtttacctattcccgctacctcccggcgcatcgaccttgcgttgactcagagtgtaccgagttttttgcaggtgttctcggtggttaccgacgaaatgcaggtagagcgtgccgtgcttgccgaagagattaagcggcagaaccctgcgctgcatgaaacgctgatcggtcagttgaaacagcttgagcaacagcagggaaacaccattacgctggaatatgtcagccatcaggctttcaaacaacagactcaaaccactcgtgcagtgatccgcagcggggaatgttcgccatacgccaacatcatcctgttcgctggcgtcaccttctgaggtctctatgcaacctttgctgcaactctcagggattgataaagcctttcccggcgtaaaagcgctgtctggcgctgcgctcagcgtgtatccgggaaaagtcatggcgctggtcggtgaaaacggtgcaggcaagtccacgatgatgaaagtgctgaccggcatctatcaaaaagacgccggtcagctgcaatttttgggtaaggaagccagcttcagcggcccgaaagattcgcaggaagccgggatcggcattatccatcaggagctaaacctgatcccgcagttgaccatcgccgagaatattttcctggggcgtgagttcgtcaacgggataggccgcattcagtggaaaaaaaccatcgccgaagccgacaaactgttggcgcgccttaatttgcgttacagcagtcagcgcctggtgggtgacctttccattggtgaccagcagatggtcgaaatcgccaaggtgctgagcttcgaatcgcgcgtcatcatcatggacgaaccgaccgatgcgctgaccgataccgaaacggcctccttatttagcgtgatccgcgaactgaaggccgccggctgcggcgtggtatatatctcgcatcgcctgaaagagatcttcgagatttgcgacgacgtaacggtatttcgcgacgggcagtttatcgctgagcgccccgttagcgagctacaggaagacacgctgatcgagatgatggttggtcgtcgcctcgatgagcaatatcccgcattaatcacgacagcggtgcgctgcgtctctcggtgaaccaggtttctggaccgggggtgaagcatgccagcttcaatctgtatgccggtgagatcctgggcgtttccgggctgatgggcgctggacgcaccgaactgatgaagatcctctacggtgcgtgcaagaaaaccgccggtactatcactctcgatggcaaagagatcaatccgcgcacgccgcaggacggtctggccaacggcatcgtttatatctcagaggaccgtaagcgcgacggcctggtgctcggcatgtcggtgaaggaaaacatgtcgttgaccgcgctgcgctatttcagccgtttgggcggcggcctcaaacacggcgaagagcagcagacggtgggcgactttatccgcctgttcaatatcaagacaccgtcgatgatgcagccgatcggcctgctctccggcggtaatcaacagaaagtcgccattgcccgtgggctgatgacgcgtccgaaagtattgatcctcgatgagccgacgcgcggcgtcgacgtcggggccaagaaagagatttaccagttaattaatcagttcaagcgcgaaggtctgagcatcattctggtctcttccgagatgccggaagttattggaatgagtgaccgcattctggtgatgcacgaaggacagctaagcgctgaattccccattgaacaggcgacgcaagaagcactgatggctgccgccgttggcaagcaatacggcgtaaagcaggagtaaacaacgatgagttctcaaattttaccggccaataaaaaacgctggatcagtaaagagtggttattagagcagaagtcgctcattgcgctgctggtgctgattgcggtggtgtcttcgatgagcccgaacttcttcaccctgaataacctgttcaatatcctgcagcaaacctcggtgaacgccattatggcggtcgggatgacgctggttatcctgacggcgggtatcgacctgtcggtcggttctctgctggcgttgaccggtgcggttgccgcttccgtggttgggcacgagtccagcgcgttgctggccgtcgtggcctcactggcgcttggcgcagcggtgggcggtattaccggggcgattgtggcgaaaggtaaagtacaggcgtttattgccacactggtcatgatgctgctgctgcgcggcgtgacgatggtctataccgacggcagcccgatcagtaccggatttaacgacgtcgctgacgccttcggctggttcgggattggccgcccgctcggcgtaccgacgccagtctggatcatggctatcgtgtttattgccgcctggtacatgctgcatcacacccgtctgggccgttatatctatgcgctgggcggcaacgaagcggcaacgcgcctttcgggcatcagcgttgataaggtcaaaatcatcgtttactcgctgtgcggactgttggcggcgctggcgggaattattgaggttgcacgtctgtcatcggcccagccaactgccggtaccggctatgagttagacgctattgccgccgtcgtgctgggcggaaccagcctttcaggcggcaagggacgcatcatcggcacgcttattggtgcgctaatcctcggtttcctgaataacggtctgaatctgctgggcgtttcttcctattaccagatgattgtgaaggcggtcgtgatactgctcgccgttctggtcgataacaaaagcaataaataacctcccctacaggaataaatacaatgacaatgtctatgaagaaagttgcattatgggtttctgccgccgcgcttaccgcgtcattcagtgccaacgtgctggcgaaagacactatcgcactggtggtttccacgctgaataatccgttcttcgtttcgatgaaacaaggtgctcagcaggaagccgacaagctgggttacaacctggtggtgctggattcacagaataacccggccaaagagctggccaacgttcaggacctgatggtgcgtggcaccaaagtattgttaattaacccgaccgactccgacgcggtgggcaacgccgtcgcaatggccaatcaggcgaaaatcccggttattacgctggaccgtcaggcgagcaagggacaggtggtcagccacgttgcctcggacaacaaggtcggtggtaaaatggccggtgactatatcgccaaaaaattgggtgataacgccaaagttatcgaactggaaggaatagcgggtacctcggtggcccgtgagcgcggcgccggcttcaaagaggccgttgatgcccatcacttcaacgtactggcgagccagccggctgacttcgaccgcaccaaaggtcttaacgtgatgcagaacctgctgaccgcacacccagacgttcaggccgtgtttgcccaaaatgacgaaatggcgctgggcgcgctgcgtgcgttgcagaccgcaggcaaaaccggcgtgctggtggtgggctttgacggcactgaagacggtatcaaagcggtgaaaggcggcaagctgggtgcgacagtcgcccaacgtcctgatcaaattggtattatcggcgtagagacggcggacaaggtgctgaaaggtcagaccgttccagccattaacccggttgctctcaatctggtcgcacaaccttaatggacacggcgccaccgcgacgggtggcgcaacagactcaggaataaatgcaatggataaaggtaaactggtggtactgggcagcatcaacgctgaccacgtcctgaatatcaggcaattcccgcagccgggcgaaaccgtgatggggtcgcactataacgtggccttcggcggcaagggagcaaatcaggccgttgcagcgggaagaagcggagccgatgtttcatttattgcctgtgtaggaagtgacgatattggcgaacgcgtgcgtaaacagttagccagcgaccagatcgatacgcgtccgattgaggctatcgccgataccaccacgggcgtggcgcttatcttcgtcaatgaagaggcggaaaatgtgattggcatcgatgcgggagccaacaaggcgttgacgcctgaatatctcgaacgttataagcagcagataattgaggcttcggctctcttaatgcagctcgaatcaccgcttgaatcggtgatcgctgccgcccgcattgctaaagaccatcaaactcaggttatcctcaatcccgcgccggcctgtgagttgcccgatgagctgctttcgctggtggatatgattacgcctaacgaaaccgaggcggaaaagctgaccggtgtgaaggtcagtagcagcgaggacgccgcacgcgccgcacaggttctgcacgacaagggtattgcgaccgttatcattacgctcggcagcaaaggcgtctggctgagccaacagggtcaaggcaagaatgtgcctggattcaaggtgaaagcggtcgacaccatcgccgccggtgatacctttaatggtgcattagtgacggcattactcgagggcacaccgatggaccagtccgtgcgctttgctcatgccgccgcggctattgccgttacacgtgctggcgcgcagtcttccgttccatggcgtcatgaaattgatgatttcctcgcgcatcaggagtcctagttgccgaccatgaaagatgtcgcccgcctcgcgggcgtctccacctcgaccgtctcacacgtgattaacaataatcgcttcgtgagcgactctatccgtgaaaaagtcaacgcggcaataggcgagcttaactacgccccttccgcgttggcccgcagcctcaagataaatcaaacccgcacaattggcatgttgattacctcgagcagcaacccgttttattccgaggtcgtacaaggcgtggaacgcagctgctacgaacgtggttacagccttattctctgcaataccgacggcgacgaagagcggatgaatcgcagcatcgaaacgctgctgcaaaagcgggtcgatgggctaatcatgatgtttaccgaacatcattgtccgtcgcaggatacgctgagccgttatccctctattcccgcggtgatgatggactgggcccctttcgccggtctaaacgacattattcaggataacgcattcatcggcggcaagatggcgacggagcatctgattgagcaaggctatcggcgtatcgcctgtattatcggtccgacggataaaacgacctcgactcagcgccaggacggttatcggcaggcaatgaaagaggcggggttggtcattcccgaaggttatgaggtgactggggatttcgaattttctggcggattaacggcaatgcagcaactgctggcgctaccgcagcggccagacgcggtctttgccggaaacgatgcaatggcggttggcgtttatcaggcgatttaccagcagggtctgcgtatcccgcaggacatcgccgtcatgggatacgatgatattcaactggcgcagtatctcacccgccgctgacgaccattcatcagccgaaggacgagctgggagagctggccatcgataccttgttgcatcgactaaaagaccctgaggccgaagcccaggttctggtgctaacgcctgagctggtggttcgaggttctgtggggagaaaaccttaattctctccttctttatatagaagaagagaatctcaaatcgggtcgcgcagtaaaatggtacaggcctcaagcgccgcatccgcgtcgcttgccagaatcgcatcaacgattcgctggtggtgctcgagcttgatcacctcattattggtaattgcgcggaagtagctctggtaaaccgagctgaacaaattagcgaaagaggtcaggaacgggtttttgccggcctcgtagataagctgatgaaactgggcatcgacgtttatccaacgttcgcgatcgaagttctcatgcagctcgcgcatctccgacatatagagagagagctgttgcttctgctctgtgcttgcctgaacggcggcgagcgaacaggcctggggttctagtgccttacgcagcagaacaaagtgtgacatcacctcgtcaaagttatctcgcgtcatccaccaggtcagcagttcgctgtcgagaaagttccagttgctctgcggcatgacccgcgtaccaattctagggcgtgggagaagcatgccttttgcggttaacgtttttaccgcttcccttaccgcggtgcggctcacaccgaacaattcacccaattcaatctctccgggcaggatacttccctcggcatactcgccggataacactctttgagcgatattctccgccagaacataagaaaggtttcgctgagcagcctgttgttgcgcgttgagtgacatgaattacgtcctgtgcgatttaaagtcttcattattcaaactagtttactccagtaattacagagtaaagggggagtttacgggtaaaaacgtcgttttattgtgcgtttatggcgcatttgtcgaaaaaagagacggtcagaaagttttttaaaataaagggttgcggctcctcagaaactccctataatgccgctccatcgacagggaacaacgcagcagcaacgcggtgtgaacaagtcggaaagaattaaaaatgatgatgaccgcgaaaataaacggttgacatcaaatgaggaaagcgtaatatacgccacctcgagttagcaagcgaaagcgcgtaactcactgctctttaacaatttatcagacaatctgtgtgggcactcacaagacgatatcagccgcttcggtggcaaaaaatatcaagtcttagagtgaccaagcagtaattcattatgaatgatgtgaagtaactttgagcatcgctgagcttgtttcagcaaatcgaacttttaattgaagagtttgatcatggctcagattgaacgctggcggcaggcctaacacatgcaagtcgagcggtagcacgggagagcttgctctctgggtgacgagcggcggacgggtgagtaatgtctgggaaactgcctgatggaggggataactactggaaacggtagctaataccgcatgatgtcgcaagaccaaagtgggggaccttcgggcctcacgccatcggatgtgcccagatgggattagctagtaggtggggtaatggctcacctaggcgacgatccctagctggtctgagaggatgaccagccacactggaactgagacacggtccagactcctacgggaggcagcagtggggaatattgcacaatgggcgcaagcctgatgcagccatgccgcgtgtgtgaagaaggccttagggttgtaaagcactttcagcgaggaggaaggcgttgtagttaatagctgcagcgattgacgttactcgcagaagaagcaccggctaactccgtgccagcagccgcggtaatacggagggtgcaagcgttaatcggaattactgggcgtaaagcgcacgcaggcggtttgttaagtcagatgtgaaatccccgagcttaacttgggaactgcatttgaaactggcaagctagagtcttgtagaggggggtagaattccaggtgtagcggtgaaatgcgtagagatctggaggaataccggtggcgaaggcggcccctggacaaagactgacgctcaggtgcgaaagcgtggggagcaaacaggattagataccctggtagtccacgctgtaaacgatgtcgacttggaggttgtgcccttgaggcgtggcttccggagctaacgcgttaagtcgaccgcctggggagtacggccgcaaggttaaaactcaaatgaattgacggggcccgcacaagcggtggagcatgtggtttaattcgatgcaacgcgaagaaccttacctactcttgacatccagagaatttgctagagatagcttagtgccttcgggaactctgagacaggtgctgcatggctgtcgtcagctcgtgttgtgaaatgttgggttaagtcccgcaacgagcgcaacccttatcctttgttgccagcacgtaatggtgggaactcaaaggagactgccggtgataaaccggaggaaggtggggatgacgtcaagtcatcatggcccttacgagtagggctacacacgtgctacaatggcgtatacaaagagaagcgaactcgcgagagcaagcggacctcataaagtacgtcgtagtccggattggagtctgcaactcgactccatgaagtcggaatcgctagtaatcgtagatcagaatgctacggtgaatacgttcccgggccttgtacacaccgcccgtcacaccatgggagtgggttgcaaaagaagtaggtagcttaaccttcgggagggcgcttaccactttgtgattcatgactggggtgaagtcgtaacaaggtaaccgtaggggaacctgcggttggatcacctccttacctcaagatacgcattgtgcagtgtccacacagattgtctgatagatgtaaacgagcaagcgctacctgttgatgcagtaagggaaaccttacgctgatacgaaagaagcgccgggttttatcacctggtgcggcattttcgtgtccccatcgtctagaggcctaggacactgccctttcacggctgtaacaggggttcgaatccccttggggacgccacgccgataatgtgtgaaagacattatcactctgtaccttagcaggtcagaatttatcttaaagatgactttaacgagtcgtgtttaagatattgctctttaacaatctggaacaagctgaaaaattgaaatgatacagctgaacataactctccgtagaagtactgagttatgcgcacctgtattagagtctctcaaataatcacagcctcgaatgttgtcactctttatgagtttataagacaccttcgggttgtgaggttaagcgactaagcgtacacggtggatgcctaggcagtcagaggcgatgaagggcgtgctaatctgcgaaaagcgtcggtaaggtgatatgaaccgttatacccgacgatacccgaatggggaaacccaatgtgatacgtcacattatcgcatggtgaatacatagccatgcgaggcgaaccgggggaactgaaacatctaagtaccccgaggaaaagaaatcaaccgagattcccccagtagcggcgagcgaacggggaacagcccagaacctgaatcagtttgtgtgttagtggaagcgtctggaaggtcgcacggtacagggtgatagtcccgtacacaaaagcgcatgaattgtgagttcgatgagtagggcgggacacgtgacatcctgtctgaatatgggggaccatcctccaaggctaaatactcctgactgaccgatagtgaaccagtaccgtgagggaaaggcgaaaagaaccccggcgaggggagtgaaatagaacctgaaaccgtgtacgtacaagcagtgggagcctacttgttaggtgactgcgtaccttttgtataatgggtcagcgacttatattttgtagcaaggttaaccgtataggggagccgtagggaaaccgagtcttaactgggcgtcaagttgcaaggtatagacccgaaacccggtgatctagccatgggcaggttgaaggttgggtaacactaactggaggaccgaaccgactaatgttgaaaaattagcggatgacttgtggctgggggtgaaaggccaatcaaaccgggagatagctggttctccccgaaagctatttaggtagcgcctcgtgaattcatcttcgggggtagagcactgtttcgactaggggccatcccggcttaccaactcgatgcaaactccgaataccgaagaatgttatcacgggagacacacggcgggtgctaacgtccgtcgtgaagagggaaacaacccagaccgccagctaaggtcccaaagtcatggttaagtgggaaacgatgtgggaaggcatagacagccaggatgttggcttagaagcagccatcatttaaagaaagcgtaatagctcactggtcgagtcggcctgcgcggaagatgtaacggggctaaaccatgcaccgaagctgcggcagcgacgcttaggcgttgttgggtaggggagcgttctgtaagccgtagaaggtgaactgtgaggtttgctggaggtatcagaagtgcgaatgctgacataagtaacgataatgcgggtgaaaaacccgcacgccggaagaccaagggttcctgtccaacgttaatcggggcagggtgagtcgacccctaaggcgaggctgaaaagcgtagtcgatgggaaacaggttaatattcctgtacttggtgttactgcgaagggggacggagagggctaggctagccgggcgacggttgtcccggtttaagcgtgtaggggtgtagacctggtaaatccggtttactgtaaccctgaggcgtgatgacgagccactacggtggtgaagtagttgatgccgcacttccaggaaaagcctctaagcatcaggtaacattaaatcgtaccccaaaccgacacaggtggtcaggtagagaatactcaggcgcttgagagaactcgggtgaaggaactaggcaaaatggtgccgtaacttcgggagaaggcacgctgtcgctaggtggaggaacttgcttcccgagccgaagacagtcgaagataccagctggctgcaactgtttaataaaaacacagcactgtgcaaacacgaaagtggacgtatacggtgtgacgcctgcccggtgccggaaggttaattgatggggttatccgcaaggagaagctcttgatcgaagccccggtaaacggcggccgtaactataacggtcctaaggtagcgaaattccttgtcgggtaagttccgacctgcacgaatggcgtaatgatggccaggctgtctccacccgagactcagtgaaattgaactcgctgtgaagatgcagtgtacccgcggcaagacggaaagaccccgtgaacctttactatagcttgacactgaacattgagccttgatgtgtaggataggtgggaggctttgaagcgtggacgccagtctgcgtggagccaaccttgaaataccaccctttaatgtttgatgttctaactcggccccgtaatccggggtgaggacagtgtctggtgggtagtttgactggggcggtctcctcctaaagagtaacggaggagcacgaaggttagctaatcacggtcggacatcgtgaggttagtgcaatggcataagctagcttgactgcgagagtgacggctcgagcaggtacgaaagtaggtcatagtgatccggtggttctgaatggaagggccatcgctcaacggataaaaggtactccggggataacaggctgataccgcccaagagttcatatcgacggcggtgtttggcacctcgatgtcggctcatcacatcctggggctgaagtaggtcccaagggtacggctgttcgccgtttaaagtggtacgcgagctgggtttagaacgtcgtgagacagttcggtccctatctgccgtgggcgttggaagattgagaggggctgctcctagtacgagaggaccggagtggacgcatcactggtgttcgggttgtcatgccaatggcattgcccggtagctaaatgcggaaaagataagcgctgaaagcatctaagcgcgaaacttgcctcaagatgagtcttccctggagcttcgagctccctgaagggacgtttaagactaagacgttgataggctgggtgtgtaagtgcagcgatgcattgagctaaccagtactaatgacccgagaggcttaaccttacaacaccgaaggtgttttagagagacgagacgaaagtttcaagaaatcagcttgttcaaagattggttctgatggcggcctgcaggaatgtggaaagcggttgggatgaaacagaatttgcctggcggcagtagcgcggtggtcccacctgaccccatgccgaactcagaagtgaaacgccgtagcgccgatggtagtgtggggtctccccatgcgagagtagggaactgccaggcatcaaataaagaacaagccctagtcgaaagactggggctttttctcgtcggtaatttaagaaattccagttcaagagaaggcccctgtctgacgacaggggcttttttgtgcgcgtaacgttaattaaaaggtcagataacgacggatgagaggctagattgactctcttttcttaagccagtcgacgataaaattaccaatttcagcaatattgttgagatccagcacgggcaaagacgatttaagctgcgaatcagtggcgatagcgagcacataatcgtctacaatcgcatcaatttctctgccacttgcctgtcgaaatagcgcaattttatctattttttcgtgcttaaaaccctcaaccaaaatcaggtcgagggtcgtttggtcgaatcggctagccaaatagtgcagatcgagtttctcggcatcgggcgtttccgtcattaatgcccatcgattgctgctcgctaccattgtctgatccgcgcctgcttttctcagctcgtagctgtctttaccgggggtatcaacatcgacagaatgatggctatgtttaatcagacccaccctgacattacaggcacgtaaatagggaatgagttgcttcagcaaggtcgttttacctgttccgctatgcgcgacaacacctaatagcagggtcatacactttcccccgtatcgcctgccagcgctgaacgtcttcgggagtattcagattggcaaaacaactgggatcatcgaaggtgacttgctgtgctgcacactgcttgaagaacagcatgactttcctctctccacgcgttaaatagtctcgaagagtgggtatcagactcttgttgagcaggcacagggctggatgagcacgttcggcatccgtcgcataaacggcggcagattgccctctggcgttccacagacgctgtaccagattatcgggaaacgccggtacatcgcaggggacaaacgccacccattcggtttcgcttgccaccagcgctgcaagcatccctgaaagggggcccgcataatcgggaataaggtctccgatcacaggatagaacgccgcatagtgctcctgattctgattactgctgatgagcagcgtattaacctgtggcgctaaccttttggaaatatgcacaaaaagcggcaacccgttaacctgcaccagacccttatcttgccccattcttgaagaacgtccaccggcaagaatgacgcctgtaatcgcgctctcaatcatttgctgactcctgttttctgtattcactattctggaacacagcgcgaaactttaaaacgttaactcgatatgttgtcttggatcagcttaatcttttttctgttaagacattctgttaagtatcagataaccctgtcagcctgatggatataccccgtcaacgaggccaaaaatgaaagatcaccgtattaatgaactgatcgatctcctgcattctgcctggaaacaagaggctgatttaagcttgttacaattattaagcaagctggcacaggaggctggctttaaggacgaccttaaggatctcagcgatgacgcattgatttatcagcttaaaatgcgtgaaacagccagtacagatgagattcctggattaaaaaaagattatgaagaggattttaaaacggcaattttgcgtgccagaggcgtcctcaaggattgatgtaaacttatgtgaacttcatgcgtgaggctaaaaattgatggtactatttcaaactatcgttttgctctctggccaatctgaatgaagttatgaataattctgcttttaattttcaggcactgtctccagacctaatcctcgatgcgctggaaagtgttggcttgattgctgagtcaggattaactgcgctcaatagctatgagaatcgggtatatcaattccttgatgaaaaccgccagcgctatgtggtgaagttttaccgtcccgagcgttggagtgctgctcaaatagaagaggagcatcgcttctctcacgatctctttactgccgaaatccccgccgttgcgcctgtttccctccagggaaaaacgctgcatcagcatcagggatatatgtttacgttgttcccaagcgtgggcggtcggcagtatgaaatagataatcttgatcagcttgaatgggttgggcgtttccttggcaggatccatcaggtcggaagcgagaatctatttacccagcgtccgactatcgacgttgcagaataccttactgaaccgcgcgaggttctctccactagcgagttaattcctgctaaacaacgtgccgcatttcttacccttcttgatgccttaattgcgaccataaaagaatattggcatcacgactggcagccgcgtcgtttacacggtgattgtcaccctggaaatattctctggcgtgacggccctatatttgtcgatttagacgatgcgcgtaatggcccggccattcaggatttatggatgctattgcacggcgatcgcgccgagcaactcgttcaactggatattttgcttgaggcatacggcgaatttgccgatttcgacagccgggaactggcacttattgaaccgctgcgcgcgatgcgaatggtctattatctcgcctgggtgacccgtcgctggcaggatcctgcattcccacacagtttcccgtggatgaaggatgaagatttttggttgggtcaggctgcggcatttaaagagcagattaataaattacgggcgcctcctttacagttgatgccaatgtactgagaaacgaaataagctttatataattatttaaacggagatggatgagttatgaagaaccttttttctgccagaaagatcatgatggctttcatgggtatggtattggcgttcagcgcctctgctgcgcaattttctaatggtactcagtacattacgctcgacaagccgctggctaacgagcctcaggttgtcgagttcttctcattctattgcccgcactgctacgagttcgaacgcgtctggcatgtgtctgacactgtgcgtaaaaacctgccacagggcgtgaagtacgtgaaatatcacgttgaattccttgggcctttgggcaagcagctgactcaggcatgggccgtagcgatggcgctgggcgtagaagacaaaatcagcccgctgatgtttgacgccgttcagaaatcacagacggtgaaaactgaggccgatatccgcgatgtctttattaaggctggcgtgagcggtcaggactatgacgcggcgctgaacagcttcgtggttaagtctctggtcgttcaggaagagaaagccgcagccgatttcggtctgcagggcgtgccgtccgtttacgtgaacggcaaatatcaggttaaaaatgacggacttgataccagctctatggatgcttacgttaaacaattctctgacgtggtcaatttcctgacgactcagaaataagaattaaaacgctttccactttgataaacgccagcgcaacgctggcgtttatattttatttaataaactaacgcacataccccggccacgcacctgctttctcattagccatattttgttttatctttattcagtatcatttaactttctggattaatatttatggaaaaattcctaaagggatattaagtctaatatttatatccacaacgatgattaaaataaaatgacagcccaattgcccctttctcccttataacttgatgattaaccgccgtatatcgatctgttctgctatatgcaactcaaatctatgatcctgtcgcaaaactatgcacaaacttatccacaggctggatcctgggagaaagctcgcaggatcaacatcaaatttcctttcaaggttcgcctttaacctcagctatggcatgcttaggggtatgacatgcgacgaataaagaagagttatggcccagattgctgaaaatcccttaatcctggtagacggatcgtcttacctgtaccgcgcctatcacgcatttcccctctgaccaacggggcgggagagcccaccggtgcgatgtacggcgtacttaacatgctgcgcagcctgttgctgcaatatcagccgagccacgtcgcagtggtgtttgacgccaaaggtaaaaccttccgcgacgaactgtttgccgaatacaagtctcatcgtccgccaatgcctgacgatctacgcgcacagattgagccgctgcatcagatggttaagtccatggggctgccgctgctggtggttccgggcgttgaggctgatgatgtcatcggtacgctggcgctcgaagccgagaaggcagggcatgcggtactcatcagcaccggcgacaaagacatggcgcagctggtcacgccggccgtgaccctgattaacaccatgaacaacagcattcttggccctgacgaagtggtgaccaaatacggcgtaccaccagaacttatcatcgattatctggccttgatgggcgactcttcagataacatccctggcgtgccgggcgtgggtgagaagacggcgcaggcacttctgcaaggcataggcggactcgacgcgctgtacggcgatctggacaagattgccactctcagcttccgcggtgccaagaccatgggcgccaagctggctgacaataaagacgtggcttacctttcctaccagctggcgacaattaaaacggacgtcgagctggagataacctgcgcggatctcaccgttagcgaacctaacgacgccgagcttagagagctgttcgatcgctacgagttcaaacgctggttggctgatgtcgatcagggggctggctaaacggcaagaaaggcccgcgacggccagtaaaaaaggtgccgtacctgaggtcgaaagcagcgtaaaaactgcggtagagcgtgctcagctctctcaggagggctatgttaccattctcgaccaggcaaccctcgacgagtggctgttactgctcaaaaaatccgacgtttttgcctttgataccgagaccgacgggctcgataccctgacggccaacctgattggcctgtcgttcgccatcgccccgggtaaggcagcctatttgccggtcgcccatgattatctcgactccccggtgcagctggaccgcaacgaggttctcacacagctcaagccgctgctcgaagatcccaagcaggcaaaagtaggtcagaatctcaagtttgaccgcggtgtgctgctgaaatacaacatcgacctcaaaggtatcgattttgacaccatgatcgaatcctacgtgctcgacagcgtctctggtcgtcacgacatggacagcatggccgacaggctgctgggccacaaaaccgtgaccttcgaagagattgctggcaaaggcaaaaatcaactcacctttaaccagattgcgttggagcaggctgccccgtacgccgctgaagacgccgacgtgacgttgcagttgcaccaggctatgtggccgaagattgccaaagagccgggcctgaagaccgtctttaccgatatcgatatgccattggtcgccgtactgtcacacattgaacgcaccggcgtgcttatcgaccaaaacattttggctgcacactccaaagagctggcaattcgcctcaatgagctggaaagcaaggcgcacgagctggccgaagaacctttcaacctgtcttcgaccaagcagctacaggcaatcctgtatgaaaaacaaaatctgcctatcttgaagaagacaccgggcggagcgccttcaaccaatgaagaggtgctggccgagctggcgctggattacccactgccgaaggtgattctcgagtatcgcggtctcgccaagctgaaatcgacgtataccgacaagctgccgctgatgataagcccggtagatgggcgggtgcatacgtcctaccaccaggcggtgacggcgacaggtcgtctgtcgtcgagtgatcctaacctgcaaaacattcctgtgcgtaacgatgaagggcgcaggatccgtcaggcgtttattgcgcctgaggactactgcattgttgcggccgactactcgcaaatcgagctgcgcatcatggcgcacctgtctaaagaccaggggctgctgaccgccttctctgaaggcaaggacatccaccgtgctaccgcggcggaagtgtttggcaccgaactggacaaagtgtcaggcgagcagcgccgcagtgcgaaagctatcaactttggtctgatttacggcatgagtgcgtttggcttatctcgccagctcaacatcccgcgtaaggagtcccagcgttacatggacctttacttcgaacgttatcctggcgtgctcgaatatatggagcgcacgcgccagcaggcatctgagcagggctatgtcgaaacgctggacggccgtcgcctctatctgccggacatcaagtccagcaacgccatgcgtcgcaagggagcggaacgtgcggctatcaatgcgcctatgcagggaacggctgcagacattatcaaacgagcgatgctaaaagtttcagcctggctggaacgacctgatgcgcctcgtgcgcgtatcatcatgcaggttcatgatgaattagtgttcgaagtgcataaggatgacgtcgagaaagccagtgagaccattcgccaactgatggaagagagcatgacgcttgccgttccacttaaggtggatgtcggcgtgggcgaaaactgggatcaagctcactaagtgacgataaaataagctgattttgtaattaaacaacatcaagggcatgaaattgtatgaggctgatcgcatatccctcaacttttgtgtaagtaaactacaaaaaatactttttcatctcaaaaaaatgaggtaaagtctgaggcgtagggtacagaggtaagatgttctatctttcagaccttttacttcacgtaatcggatttggctgaatattttagccgccccaggcatttatgtctggggcgttttttattggatttttggcgggattttgaccgttttttgcacccctttatgaaacaaaaaagggcggcctaagccaccccgtttcacctaaacacgcttatcgcgtcgagcgtttatctcactcgcctgacagcacatcctcgagcacttctggaggaatttcgctaaaccaggtattcagtttcgccatcagcttatctacaccaatttttttcagggaagagaaggcttcaacctgaatatcgcccatgaaggattccacttcattgcgtaccagcgtggtctgcgctttgcgcgcgcctgaagccagtttgtcggccttggtcagcaacaccagcaccggcgtgccaacgtcaacggcccactggatcatctgctggtcgaggtctttcagcggatggcggatgtccatcagcaccaccagacccttcaggcagttacgcatttgcaggtattcacccagcgcgcgctgccatttgcgtttcatttcttcaggaacctgggcatagccatagcccggcaggtcgaccagacgaatgccttcttcaacctcaaacaggttgatcagctgagtacggcccggtgtcttactggttcgcgccaggcttttttgtccggtcagcgtgttgagcgcactggattttccggcgtttgaacgaccagcaaatgcgacttcaatgccctcatcactcggtagatgccggatatcaggggcactgatgacgaaatgggtcatatgatagttgtaagtttggctggtcaaaacgtgtgtctccgtgaggcttcggtatctggctggcgattatagctgtatcagaggcgagatgtggttctgttttacataacgcatggtgaaaaatcattcatagagatgatagcagatgagatttctgccattaagctgtgagagttttgccatttctggtgcgagctaagacgctagttttaataccataaacaatattatttattaaatacagtaagatggtgcccgatgcgtaaatacaccttgggtgtcatcgcggcggtatcttgagcctttagcgcgttagggtaaagtgtttattacgcgatgagcgcaagaaaggaaacaaggacgacccgcgctaaaggatgtttggaacccatcgtgctttacggacaaaactgccaggctggcggttcaggcaaagggaaatagggacatatttgcctcacatggacacgtatgtacaataattcttccatgagaataaataaaaaggcgacaaggttaacttgttgccttttttctttgtctgctttctgctagattccgccgcaattctatactaaatgaacacacctaagagtagatgctatgaaccagtcagcgaaagcaccgcgtgccaaagccgcgacgtctaaaacgaagaaaaaaagtcgcgttgagcttgatatcgaagcgcgcgaacgtaagcgtgacaacaaacgtcgtggccacaaaccaggcacccgcgccaatccggatgcagagaaaaaccagtcggccaatagcggcaagaagaccgatccgcgtatcggcagcaaaaagcctgttccgctggtggtagagacggtatttaataattcacctaaggctaaaaagccagccaagccgaagcaggaagccaagccagcgctgccgccagaagaagaattaacccttcttgaaaacgacgcgcgtcttgattcactgctcgacctgctggacgaaggcaaaactctgagcgcagaagaccagagctacgtcgatcagacactcgaccgcatcgacgtgctgatggaacagctgggtatcgagctgggtgacgaagacgacgaagacgaagagcagggcgaaaacatgtatcgcctgctgaaaggcggtaactgatttagtcaggcccctgtgggcttgagcatttgagggttcagtcaggcattgcgacctgactgaacctttttttcttagaacatccgcgaaataatcgattttttgcccgccaaatagtgcttcgcaaccgcgaagacgtgtcctaaaaagaaaatcccgagcgtgatgcaggcatagcgatgcagcacaaagaagaattcgttcaccgccagagtatcgaccggcctcggtatcggaaacagaccaaacaggttgtagcctttttgcagcatcaggaagccagaaatcagcgtgataaaaatcaccagataaaagagctcatgggcgaaaatcatgaacttcttcttcagtacgctgacatcggcaggatagggcaccgaaggtcggaagaagcgccatgtaaagcgaatgatcatcaccggcgtagcaagcgtacccagcgtcatgttcagcaccgagaaaaattgaaagtaggcagtcccttccagcgcgtgcagcagataacccatacacatggcataaatgatgatgatagcaacgacccagtgcaggagacggcttaggccatcatagcgaacgggcaaggtaagacggttttccattagatattgattcctttgtgtttagtgggttagaacttcacctgcattgaggcccagagattgcgccccggctcaggcaactgcgtttgtgacgagaaaccaaaatctttattgcccgccatgttcaagtgctcggtgtactgcttgttgaacagattatcgatgccgccgctcagtcgaaccgtcggattaatgacgtagtcgacattccaggagaccacgccgaatccggcgctaggcccatgtcctgacccgtgacgttgccctgttctgcggcaacgcgatgctgtgcactcaccacgcgccacagcaggctgctgttccagtcgttacccgcatagctcagcgtgaaacgggaatcgagtggtggcatctgtggcagaggctggttgtcgctaagatttctaccccatgcccaggccaacgaggcttcaatcttccagcgagggctcagcgcgtagctgctgccaatctctgccccataatctgggcgttgacgttgcgggttgctttcttcggtgcgccatagtcgaagaggatgaagtcattaatttggccgacatagccagcaagccaactctgcaccttttcatcgctgtaacgcgtaccgaaatcgagctgagtggttttctcggtatgaatgtggtcgatatcaccggtactggagaacatttcccagtagtccggcatgcgctcggtgtagcctaatcccgcgtaggacatcaccggcaagcccgatgccgtagtttcatagcgggtgaaaaagccggggagtatatgggttgttgaggtattggacgtaccgaaatctgtcgccgttgatctatccagacgcacaccgctgatgcgctttccaggggagtcgacgccctgagtaaactctgcaaacactcctagctggcccaactcggcgtttttctgccaatgcgtcataccgccgctgcgatgggtgctgctttggccgtcaataccggctaccagctggttgtttgaagcctgccaggtactggccaaccgcgtaccgtaggtgaccctatcgacgcgcgacgccatccgcattaccggtgtgcgcaaggagtagttatccataatgtgatcggcgtgattgtaataaagccgccaactcacgctggataaagcgtcgctgatgttgcgcttttccaacagcagcccagcgctcttacgtagaaactgcgagccgtccatcgcccgtccaccgtagcgtgcttcgccgtcgctggtccccaggctcaattcagccaacgtatcgttgtcgggtgtcaggccgagactcaggtcggtattccatttatcccaatggctcggcaccttgtttccgttgccgtcacgataatcacctgcacgtgatttccccgccgtcagtttgagataacccgaggcattacccagcgtagtgtctatgttctgatcgaatcggccgttggagcccgtgagcaggttcgcctcgccggtgaaggtcggttgggaaagagactgcggactactttcaaacagcagcgtacctgccggtgccatcggtccccaaatcaccgtttgcggccctttaatcagcgttaacagatcgaagctggcgggagaaatataggaggtcggcgcgtccattcgcccgccgcagccgccatatatcgctccgccgttggtcagaatggtcaggcgagagccaaacatgccgcgcaggaccgggtcaccgttgctgcctccattgcgaatttgcgagaagccaggaatggattttagcaggtctgcgccgtcgctggccgggactggctggcgtggggctttggttgaggtcacagtagtgaggggggagtcgagtggagcgctgatggtaatgacgtcggactgttgttccccataggcggtcatcgacgatacggcggcaaataatcccactgcccatcctgctgattttctataattgaatctcagcggcgaatttattttatttaaatggctcattattatgactcgttaattgtctttaattaaaggaagtcatcgacagacagcgtctgccacagccaatcctttagctggagaattatttttagaattttttgggtactggagctttccaggcggtatttttacacccgcaaagcatgccgaatacaggatgaggcattgagcgacttcttatttttaataagaaatatctttcacaatgtttagttgaacagaaaaataatcaccgtgacgatgatgggatacgggccaaagggaaaagactgtccgcgtttaaccttgagtatcagcaaagcgcagacggtggccagtatgcaggaggctatcatgacgtcccacagctgcgaatagcctacccacgcaccgatcgctgcaaacagcttcatatcgcccctcccattccctctcgtttattaaataaatagaaaagtttcgagatactccacggcgcgacaaagcccaatgcagccgcaatagcagcctcttgccagctaacgcggcctattcccgcaagggcaacggttaaaccccctgccagcagcgggtacatcagtctgtttggcagcagcatggtatcggcgtcaatgacggcgagcggcaccagcaggcagagtgcgaacaggactgcggcagtgtcagcggttaagccatgctgtgaggtgacccagccaaataaggccgccataaggatttcaattaagggataacgaggagagattgccgaacggcagtcgaggcattttcccttgagtaacagccagctaatcacgggaatattatgccgccagcgaataggatgatggcatgcaggacagaatgaggcggggaagctcaatgaaattttttcgccattaagggtctttggtaagcgaaagatcaccacattaaggaaactgcctatcacggcacccatgaatattgaaaataatataattaacataacgcgtttttcatcgcttatttttgccttattttcgccttgtaaataacgcttttggctagatgggtgcactattataaatatctttcagaatcccggtttgatttttgtcttatattcctcttattttcatcctttttaatgaagtagatttgtaatcgaaatcgttattgtggattatctaacgcaagcaagaactctctttactgggctgagcgttttctcaaatgttccaagaacgctcttctattatcaatacccgctttgctaaaaaatagcgaggcgatgaatgattatcatatttatctcataaacacatcgtctgaggattttatgaagttaacaaatttgagacataaaacacaacagggttttacattactcgagcttctggttgttttaatgattattgctctgcttgcaggatttgttggacccaaacttttttcacaagtcgaccaggccaaacagaaaaccgcacgcagccaaatgaaatcattatctgaatcgttggggcaataccgtcttgatgttggtcaatatcctacggccggtcaagggctgactgcccttacccacaagccgagcggcgtcaataactggcgcgggccttacctgagtcaggaggtaccgaaagacccatggggaaatccttaccagtggaataatcctacccgtaacaaaaatgtgatttatgaagtcgatattctttcaacgggcataaatggaaaacccattagctacggtttctaaccaacgtggtgcccaataatgtgtcgaatattgattgtcctgtcttattttattttctttacctctgctcaagctcattgttggcaagaggcgggtgaacgttatggtattgagccagaattgttacaggccatcggtattgttgaatctaatttaaatccaacggcgagaaataataataaagacggcagctacgatattggcttaatgcaaattaatagccgaaatatgcccgcgctgaataaattcaatattaccgaacagcagcttgtcgataacccttgtttaagtgtcatgagcggcgcgtggattctggcgggcatgatccgccagaaaggctacagctgggaggccgtaggcggttacaacgccgggctctctccaaagcgtgcccatttacgcaagcgttatatcaagcgcgtgtggccacagtatcggcgtctggttcaacagcggccggcaaaacttcggtgaatgtgtaatgaaaaactttgatgtcactttatggcttaatggcaagagcagcgtacagcgtattcgcgcgtgctcggaagatgaagcccgtatgagcgcggcgaacgacggtgcgctggtcatcaaaattaaatcgtcaaccccatggaagggcagcaaaaagccgtttcctttagtgctgtttactcaggaactggtggcgctgctcgaggccgggctggtggtggtcgaggcgattgaggccctgcacgatagctgccgcgatgacgcacaacgtcaggtgttgcagatgttattgcagaaactctatcagggatgccagctctctcaggctatggccgcgcaggcgcatttattccccgcgctgctgatcagtaccgttgcctcctccgaacaaaccgggcagctggcgaccgcactgacgcgttttcagttttatgaaaaaagaatcgaagtactgcgtaaacgtattcattcaaccctgctttatccgtgcgtggtgttgagcgtcggtgggctgattatgttctttttactcggcttcattattccgcgcttttcggtggtgttcgccggtatgaaggatccctccgccagcgcgcagtttatcgtttggtggggcaagctggtgactgagaacggcatgctgctgttggcggcgacggcggtgtcaacggttgcgttagtcgcgaccctgcgcagtcaggccctcaagacaggattgctgcagctgttgttgcgcataccgcagctgagaatgcagtttgaactctcggtcctgattcgtttttatcgcacgctcggactgctgctacagggagggatgcctgcggtcagcgccctcgagatgaccggtacgctgctgcccggcgactatcgctccaggctccagcaggtattaagcgaagtgcgcgaaggcaagtccctctcgcaaacgctcgacaactatgggctcaccacgccggtagcggcgcgtcttctgaccgttggcgagcgcggcggtgaactgcctgccatgtgtgagcgcattgccgctttttatgatgaaagcctggaacgtgcgatcgaaaccttcagcaaagtctttgaacctatcctgatgttaatcgtcggcggcatggtggggctggtggtgtttcttctctacatgcctatcttcgagatggccgggagcctgtcatgactcattctgccaatacggccttcgacgatttccaacactggtttacgctcgatgacgcagagcgccgcgcgcgacttgagctatttctcaccgagcatcctgataagttgcaccccgtggccgcggcctttgggctatatccgctgaacaaccatcagctcggtctggcgacgctggacttctcgcgcctgccgctgacggaggctatttcacacggcgttctgccggtgacgctggacgcgtgcagttatctgctgctcggcgaccccttctctctgccgttgcgtcagtgggcgcagcgttacaccgacaggcttgggctttgccagccgtcgtgggtcaatgaacagctcgaaatactctctcgccagcagcgcaccaccgaccatctcggtcagcaggcgtcagaggagtccgctgaggatgcgctcaccgatatctcgctggtttcgcttgcccgcgaacagagcccggtcattaaactggtcaatgcgacactgtttgacgccctgcaaagccgtgcgagcgatattcacctcgagagcgtcaatgacgggctggtggtgaaataccgtatcgatggcgtgctgcatttgatcacccgctgtaacggcactcagcaggccgagcaggttatctcgcgacttaaggtgttgggttgcatggatatttctgaacgccgcacccctcaggatggccgtttcaaagcactcatccagcagcgcgctgtagattttcgcgtttctattatgccgagtattcacggtgaagacgcggtgctgcgcgtgttggataagtcacacgagcagaatctgcgcctggaaacgctcgggtttgaccaaaagacgctggacgctattcgtcaactgacccacatgccgtacggcatggtgctggtcactggccctaccggtagcggtaaatccaccaccctctactcggcgctgagcgaactcaacagcggcgagagcaaaataatcaccatcgaagatccggtcgaatatcagctcggcggcgtactgcagatcccggttaacgataaaaaaggcctgacctttgcccgtgggctacgcgccattctgcgtcacgacccggacatcatattggtcggtgaaatccgcgacagtgaaaccgcgggtattgcggtacaagccgcgttgaccgggcacgtcgtgttgtcatcggtgcacgccaacagcgtgtttagcgtgctcgagcgtttcatgtatatgcaggtcgaaccggtcagcctgattaccgcacttaacggcgtagtcgcgcagcggctggttcgccagatttgcccgcactgccgcgaagaaaaatggcctgacgtgcagcagataaaagactggcacctgaccccgcaacagctggagcaaggcatctgggcgcagggtcgcggctgtgagaaatgccgcggcagcgggtatcacggccgtctggcgctggcagaagtgctgtttttcagtgatgcgatgaaagaagccatgctggcacgtgcctcaatccgccacctgcgtgagaccgctctgagagacggttttatcccgctgcgagacatcgccatcgaggctgcgctcaacggccataccaccttacaggaagtgaaacgtgttatttccatacactaacctgtggcaggttttccttcagccgcgatgtttgcagctgtttctggcgcagaaaaaaatcgcgcagatagacgtcgagagtgacgccgaactggcgtccagcctggacgcactgctcgcacagatcccctcgcggctgccttttgtcgatagcatcgagtttattctcgacagctcgcagctgcattatttgattgttccctggcagcaagggatgaacacacccgtcgatcgtgaccattatgcgattgcctttcatctgcagcagcagggacaagcatccggcccgatgcgcgtggcctttaccgactacgcatacggtaaaaacggcttcgccgcgctgatggataaagatattttcgaactgcttggcgtagccgcacgacgccgtcgtctgcgctttatgggctgcagaagccagttcgacgtgctgtggcgcaaggcgtgtcgcagtatgccggacgatgcgctgtttgcctgcatgggtccgcagcaaagcagctttgcgctgcgctatcagcaccaatggcacagcgtcttttcgctgcatttgcccaccgccgatacccagactcagcttgaaacagctaatcgcctgacgggattaccgccccttgcgtgcttcgtcatccagcctgacgccgacgggttcgttaccgcctcgttttccgacgcaagccgcgcgcaagagaatttatgaatcgccaacaatttactccactaccgccgctggccgtgaaggcctgcgccgtgatgctgctgctgttcgtcccgctgagcattttgctcgtgcaggggatgggtgaaaaacagcggcatcaacagaccctcgatacgcatcaggcattgcttgttgaacaccggcaggcagcagaaaaaatttacgccagtcagaaggcctttgaccgtcgtcttccgggaaagacccaggcgacgccggacatgcttcccctgagtctgatcggcaaagcgttacgtgaggacgtcgcgctggtttctgtcgaggtcgacaacgcacaaagccaggcgcgtctggtggttgtcaccgattcgcttaacgatcttctggacttcaccgctcgtctgcaaaaactggcaggcaaggttgagctggaaagccacagcagcgaaaccgccttcaaaggccgatggcaggtcaaggccgcactacgtatggaatatcgccatgaagattaatttttccggctcgctagacgcgcagtcgctgatgagccgtctgcgctggtacggtgccgtcgtctatcgtcagctgggtccgttgccggtcttactgggcgttatctggctggtggggggatattccttttcgtcgaacagcgccccgtgctcgagagtcaggtgaatgatattgaagagattaatcgtgaattgggcgttccactgccgatgatttcggctgaacaggccgcactacaggacaacctgagtatcaccgaataccagcaggtcaaggcgctgttccgcattcttggcaagcaccatctgactgcacaggaaagtcgttatcaatttaatcaagtcggcgatgaccaggctggtcagttaggcctggatattccgatgaagggaaattatcgccagttttacgatgcactgagtgagctgaccgcgacgatgccggtcaaggttaacgccatctcgctcacacgcgcccaccctaaccaggtggacttgcagattatgctgcgggtcacgttatctgggggaaaacaatgaaactcccacgctacctgcagtttgccctgttaattaccggtgcactggtgttgtacagcctcgttgatgatgcgccagacggcgttgaagagatagccgtggtgcagcgcccggcccacgtcgtcagcaacaggctaacgcccgtcagcgaactcaaaccgcaggacggctttatcgatattttcccctcggggataaaaccggccgatgtgcagacgtcacgcgaggtgctcgcgaagcccaaggacgcagaaccgccaaaaatcgttacgccgccgttgcctttcaggctcgtcggcgcgtggtggagcgacaatcagcgtgccttgatgctgcaacaggccgaccagcaatggattatttgccgccgttgtcgtgctccagagcgggtgtggacagggatgaacctgacaaaggattggcagttaaaaagcgtttcggcccaaagcctgacttttatttggttaccgcaaatgcgcgaacagcacatggcgcttggcgacatggacgctgagcctactttctcaggattaaataatacacatcatgctaaataaaaaacctctggctctggccatcgctctccttttactggcaggctgtgccacggacaaaaaaccggcaaacgtcgagaaaacgggggagacgcaacagcaggtgctggtgaaatcccttgagcaactgacgcgacaacgtgccgccgacccggataacgtcgaactgaagagccgtgagcaaattgataccagtattctggtcaatctgtatctcaatcaggccgaacaggcgctgaaacagaatgagtacgccgaggcctcaaggctttggcgcaccgttctgacctatcagtcgggcaacagccgtgcagcgcaggggttgcgacgcataggtacctatcgtgcactcgatgccacctatttgcaggcggtgaaactggcgtcacaggaccctgagcgcgcgctacagaaaattcagctggtgctcgaagaagagcctaactggccacagggtaaagcgttgcgtgaccatctgatgcgtaagctctcatccagcaacgtgccgtatgagaaaatggacgccgagctcaagaagcaaatatcgttgaatttccagtcacataatctgatcgatatcttcagcactgtctcgaaaatgaccggcataaacatcatttatgataacgatgtcccaagatcggccacggccagcatcatcgccagaaaaaccacggcagaagacgccatcaatctgttgctgttgactaatcagttgagaaagaaagtgcttaacggtaacactttgcttatctatccggccggacagtcgaaggataaaacctaccgtaatatagaggtcaagaccttcttcctgggttatgccaaggccaaagacgtgaacgttgcactacgcaatatgctgaagattaaagatatccacgtcgacgagcgcaccaatacgattaccgttcgcgccccggcagagacagtcgatatggcagaaaggttgcttatcacgctcgacaggcccgacgccgaggtcacgctggaggtgcaggtgctagaggtgtcgaccaacgacgccaaagcgttgggcatcgattacccggataaaatcggccttagcgtcggcaattcatcagagtcttcggagaaaagcaaaagttcagggtccagcattcctctcagcggatttaaagccggtaatctgtatgtgaggctgggtgagagtggggtattgctatcaatctcaaggatctggtgagcaaagcgacggttctggccaatccacgcatccgcgtgaaaaatggcaagaaggcggaaatccacatcggcgagaaaatcccggtggtgagcagtacgctgggtgaatacggcaatacgtcgaaggtggagtataacgagattggcctcaaactgatggtgacgccagatatcagcctcgatggcaccatcaccatggacgtggatttcgacttgagcaatctggggaacgaggtaaaggcggcaaacggtgaaatctactacaagaccaccaaccgcaaggccaagactatcctgagcagcgaaaacggcgagacgcagattctggctggcctgattaaacaggacaaactcgagagcgatcagggcctgccgtggtttagtcatatcccactggtgggcggcctgtttggcagccatagccatagcgatacccgcaccgaggttatcctgcttatcacgccaaggcttgagcacaatatcgatttaccgggcgggcatgtcagcaccattcagctcggcacggaagacctgcccggtgagcaaaacgtgattctgcgcgccaatggcaaaataaaacttaacgaagagcagttccctcagcccgactatgcgccagctgcgcatatgcctgagtcgctgcccgatccgaatcagggagcacgagaggcgagtggctcatgatgggaggtcagaaaggcttcacgcttatcgagatgatggtcacattgaccatcatggccacgctggctgccgccgcattgccggtcgtaaacaaatacacccagcggcaaaaggaggaggagctgcatctcgcgctgcgccaaatccgcgaggccctcgacgaatatcacaaggcggccctgtcggggcaggttgcaaaggccaccgatgcgtcgggttatcctgccgaattgagactacttgcctcgggtgtggcagacataacgtcgccgaatgaaaagatgatctattttatgcgccgcattccgcgagaccccttttgtgactgcgaaggccgtaaaaacgaggagacctggaaggtgcgtagctcgacggcagaaccggacagcttcgacggcggaaaagatgtttacgatatccgctcgtcgagtgcgttgagcggcctgaacggggtgccatatgcgcagtggtgagaaaggttttacgctgattgagctgttggtggtgatggccattattgccgttctgatgtcggtcgcagtgccgagatattttcagcagaccgaaagagcccgcgaggtggtgttaaagcataatcttaacgtgctgcgcggcagtttggatgattatctgcgcgacaacgcggcgtttcccgactcattggatgcgctggtggagaaacagtatttacgtcaactgcctctcgatcccattactgataaacgcaactcttgggtcgcaaccgaaaatgtggatgggaaaataaccgacgtgcacagtggatcccctttgaaatcaacggatggaaccgagtatgcaaagtggtaatgctcaaagtggtttcagttatttattattgctggtgggattaagcctgatggcgatattaatgctcaagagccaggaccttatcgcgacaaattttcgtcagcagcaagaggcgcagcttctttttgctggaaatcaaattcgtgcagccataaacagttatcgtggttctgatagtttaaaacaagaggcgagctcggtaaaaaaagacaactgttttccaataagttttgaacaattagtttttgataaccgaagcttcaagcctcgctaccatttgcggagaatttatcttgatcctttcacccaaaaaataaactgggtacaggtattcgacagcgaagggcgctggattggcgtgcactcctccgtgaagggtaatccgctgaaaaaagtcggatttaaagaggaaaacaaaacatttaaaaaagccaatagttatcaggagtgggtatttaaagtcgatgaagatccttcggcaccgttgcctgctcaatgtaaaaaatagaacgaagcataatcaggatttatccgatagggtaagtgaccaagctggcctgtataatggaaaaaacttttaatcctataattatattagttaatttcattataataaacttttctctctatttaattttatagccaatagacgtttgctttattttaaaatcaccgccttttttcggcggatgaatttaagttaattaaagtctctggttaatttttattgtgtttctggtttcatagcatatgagctgttaacaatagaattctactgaaggtaattatgtgtataaatattgtaatagccgatgagctgaggcttgtgcgcaaaggcgtcatttcccttataaataatatgcattatggcgagcagctgggtgaagacccgaccggtggctataatattattgctgatacttccacgcctaatgagctggtcaatattttatccagcaatagcgtagacctacttattctggggtattcgcttagcaccaaagaaaatagcaatcctatttcatcgctagacggttatgcgttaataaaatggttaaccaaaaaataccccgatctcaagattattgttatctcgccctataagcacccgagcctgatgcgtaccatcctcgagatgggggcgaccggttatatcagcatggatatctgcgagaagacgctggagcgggttatcgtctcggtattgaataatgaagtttatgtcgaaaagggtatgatgaagtctctctttcagggcggagatcgcagcggaaaagacgtctctttaaaggaaatggaggtcctgcggttactgtgtaaagggctgaatctgaccagcattgctaacagaatgaatttgagtattaagacggtgagtgcgcacaagctgcgggccatgagcaagctggacgtcgattcagactgtcagctttactgtctgttgacggagaccaagctgtttaacgtctcattctgaccctgaactttacccattatttttaccttaacggcaggtctggttgatgaatgtcattgtaatagcaataaccctattctttgtatgttttgttacctgcctgttatgtagactacaacgcctgtcgagacagaagtcccgcctgcgccgtattggttcttcaaaaatgttcaacaagccgcctgtggcgcgacgaccggtaaggcgtcgtaaactcgacgggcgataaaagtccgtggtgacgcacgggctcctcactttctattaaggagtcagtatgtctgcacaggctatcgaatgggatatggcgatgattcagaagtataactactctggaccgcgatacacgtcttaccccacagcgttagaattcagccccgagtacagcaatgacgcctttgagcaggcgacaacgcgcttccccgagcggcacctttccctttatgtgcatatccctttttgccaccggctttgttatttctgcggctgcaacaagctggtgacacgccagcagcataaagctgaagaatatctgagcgtgctggaaaaagagatagtgcatcgtgcctcgttgtttgcagaccgacaggtcagccagctgcattggggaggcggcaccccaacctatcttaataaatcgcagataagccgactcgtcgccctgctgcgtaagcacttcaattttatgcccaatatcgaaatgtcactggagcttgatccgcgtgaaatcgaactggatgtactggatcatttacgccttgagggattcaaccgcctcagcatgggcgtgcaggatttcaataaagaggtccagcagaaggtgaatcgggttcaggacgaggagtttatctttgcgcttgttgaacgagccaaggcgctgggcttcagttctaccaacatcgacctgatttacggcctgccgaagcagactcccgagagttttgccctgacgctccgtcgtgtggctgagctgaatcccgacaggctaagcgtgtttaactatgcgcatatgcccacgcttttcgccgctcagcggaaaatcaaagaggccgatttacccagtgccgaagacaggctacgcatattgcagcagagcatcgcgtcgctgaccgaatcaggttaccagtttatcggcatggaccactttgcccgcccgcaggacgagctggcgattgctcagcgcaatggcgaactgcaccgtaattttcagggatataccacgcagggtgaaagcgacctgctggggcttggcgtctcggcgattagcacgatcggggatacctatgcgcagaatgaaaaagacctgaaaacttactatgcgcaggttgaggctaacggccatgcgctgtggcgtggtctgaggatgacagatgaagattgcctgcgccgcgatgttattaaatcactcatttgccatttcgcgctggatttcgcggagattgagcaatcacacggcgtgagtttcagagactatttcgccgaagatttggcgctgctcgcgcctctcgcacaggacggtctggtagacatcggggagaacggcattgtagtcacgccgaaaggacgactgctggtgcgcaacatctgtatgtgcttcgacagctatctccgtcagcaggttcgccagcggcagttctcgcgagtaatctgatttttatctgatatttcacataaaaaaacagccgcttagcggctgtttttcagtgtctgcatcctgctgcgaaataacgcttactgatgatcgatcggtgaaggtttgatcggcagaggcagtttgtagattttaaccggatattcaaccgttgaaggtttgccgccggtggtggcaggcgtgcggttgatttgacccgatggcatccacagcgcgccgtcgcttacccacatggcatcaatccagaccagacgcgggtcggagaccaccgtcgaaactttaccctctgggtaatgcgtttgatggaacgggtgttgatgtcagacgcgtagatattgccctcgctgtcaatggcggttccgccagtgctccaggtatcaaggaatttcttggcgtgcttgttcacttcgctggctggcagggaagcatcgtccagatagcgggtttcgatacgggctaatggacctggaattgcctggtagtacagccatttaccatcaggagacacttccagctggtccagacccacgcgtttttccttgccgtttggcaggatgagttttttgccgtcggcatagattggcgtgtggtcaatcgacagcggctcgttgtccagtacgcggtgtgccttgccggtattcaggtccagcacgactaagcctacggcaccaggatccgtcatataggcgaagtggccgttgaagcgcacgtcatcgatatagctggcaggtttaagcaccggtggcttgataagataggttttgaccaccttattggtggagagatcaatcttcaccagtttagcgccaccgtctaccgattttgcaccggtaccgatgccagtattacccgagtctaccgcccacaggtaaccgtctggcccaacgcggagggcgtttacgtggaggaagtgatgctcaggatcggaaggtttccactggttccagtccgcgtcagggtaaggggtgatttttccgttctcaccgacttcaccgagttccagacccgggccttcagactgggtaaaggaggcgaaaatacgaccctcttttgttaccgtcacgccgttccaaacgtgtgcagaagttgccatttgttgcaaacgggcatcttgctgagtgggaagtgtcggaggcagttgatcttttgcctgcagtcccgttgccaataacagaccaatagtcagagtgagtgtttttaccacgagtttcatgccagctcctgttcaaaataatgcttagaggttgatacggagttcgcttgtagacaggggaatagcatccgttgcccaggccgcgttcttacaatgccacattgcgtaaggtgtgcggcaaaacggggtgttgccacccctaaggtcgttcaaaatctagaaggttgcttagaccgggcaaccttttgagcgcagtaagctattgaaacgctcaggatctgtggtgcctgaggcgttgtgcgccctgatttgctcttcacgctcggcgtgtttttgtacttttggcagcaggtcctgcagctcttcataagggatggcgataacgccatccgcatcgcccacaatgagatcgcctgggttaaccagtagaccggcgcaggagattggcacattcactttacccggaccgtctttgcttgggccgcgcagcgtattaccgcgagcgaacacggcaatgccgccttctgcccattcgttcagatcgcggatcgcgccatcaatcacgaagcctgcgattttcttggtcagtgcagaagtgcgcatcagaccgccaatcagcgcctgagtcaggtcacctgaaccgtcaacgacaataacgtcgcccggctgtgccatctcaatggctttgtgaatcatcaggttgtcgccggggcgtacttttaccgtcagagccgggccacacagcacaactttgttgtcggcgtggtaaggctgtaggccaagtgcagcggtgctgcggcccatggtatcgccgatgtttggaaccggcaggcggcggaatgcctcgatggtggcagagtcaggcacgttgtcgcgttgaccgataaagtagcctgctggccattcgctgcgagaagtcattcgttactctcctttcttcagggattcaggatttacacaggcacgaatattgattcgattctgttgtaagaaatctaaacactgctgcgcggccgagcgagatacggcatccagcgcctcaggggttgttccgccaatgtgcggagtcataacaatattgctgaattgacggaaagggtggtcgagcggtaacggctcgacggcaacggtatcaagacctgccgccgcaattttgccctctgttagcgcctgaaccagggccggttcgtcaatcagctcaccgcgtgaggtattaataacgattgcgctgtcgggaagctgtgccagtgtgtcggcgttaagcatcaggcgagtcgccttgttaaccggacagtgcagacttagtacgttgctgttttttaacagctcttgcagagaagaatattgaaccgcatcggacgtatcggtacccggcgcaatggccgggtcaaaaaatgccgtacgcatgccgatggctttggcaatgtgcgctacgcgacgaccgatttcgccatagcccaccaggcccaacgtcttgccggacagctcaatcccttggctgctacgggtccagcggccctcggcaatctcctgctggaagaaaggcagctggcgcgctgcgctcagcatcagtccgacggtcagttcggccacggactgcgcattggttgcaggcgtggtcagtaccggaatagcgcgttctgtggcggctgccacgtcaatgttggtcacgcccacgccgtgcttgcaaatgatttttagtgacgggcaggaggcgatagccttggccgtcaggttcacggtgcgggaaataacggcatcgtaagcccgggtttccatcagctgttccacttctttttcgtcgttggcattttgcaggtaatctacctcgcaacccgcgtccgccaagactttgcggccagctgcacccagtgccggtgcggtcattaaaaacttataggtcatacgctactccagtgctatttttacccatattggcactgttaaaagataaatcataacgcctgaattttatttattgattcctacgaggaatggaatggaactgaaatacctacgctatttcctggctattcaggacaccgggcatctgggaagagccgctataacccttggtattactcaacccgcgctaacaaaatgcattcaaagattagaaaaaatctataacacacgattgattttaaaggtcggaagagggatccgtttgactgaagcggggttgctactttgtgagcgggctcaaaaaatcgtacaagacatggaaatcactcagcgagatatgggcgcgctggcggatggcactgcgggctatattcgcctcggcgcggcggcaacggcggccgaattcatgctgcctcagttggcaaaaaggctgttgattgaggctccgagtgtgcgtcttgacgtgaaagtcggcatgaatgacctgctacagtctacgatgcgagaaaaacagctcgatattatcctcggctttttgccggacaaaagtcacgagtttatcgcccgcccgctgctcgacgaccctgtcgtgctggtggccagcaaagaccatccactggcgggggtccatcctacttcggagcagctcgaccagtacaactggctgctgccgtcgaagaaggtcgcgacccgtcaatggctagaacagcgtctgcgtgcaggaggatatccaccgccgcgtatccagattgaggctaactcgattgccacactgcattcggtgattgtcgaaaccaacctgctgagtttcatttcgcgccgcgcactggaggagatacagcacgcaatcccgctggtcgaaatcccgatgccgctgttggtgatgccgcgcacctttggcctacagttccattcctggagtgagctttcgccggtagcgcgacagtttgtacagatagccgagaaaatttggaattaccaatagcccttcaaagagagcgtctattgatttaaatgtagcctgtagtaaacgaatcactcagtaaataaacagtaactctgaaatattagaatatacttctttatacaccgccacatctccttcgatacaataggcttactattattattctctgggtatcgtcccagggaataaacagataatccctcgttattatttccctctaaactaattccgttacgtgataaataaccaaagagataactattcataacttgttgtaacttcttttcgtgaacacggcgtgataaaaatgtattacaaatgttataagtcgattcgggttaagtttaagtaatatcattttatcctgccgtattttgaatcacagcgcataaaactgtggccagaaatatgaaggggtaatggccattattaatgaacgtagggaaacatattatgagtaaagcgtctgattttgcgtatgtcatcgcgcgaattcttgccgtggggctgttcttcacttcagggcttgaaaaggtattccagtactctcagaacgtcagtgagatggcgcagaatggcgtaccaagtttcttcctgccgttggttattctgctcgaagtagggggcagtattgccatcgccttcggctttttgacccgctttacctctgtgttcatggcggcgttctccatcattgccggtttcctgttttatcaggggttcaccatgccacacctgattgtatggcttaagaatgcgtcctgcgcggcaggtttcattttgctggtattaaacggccctggccgctggagcctggatcatctgattagcctgaagtttggcaacaagaaaaccggcggtgcgcagagaagcgcagcataacgatttaaaagaaatctgtagtggcgggttagcggttttcgcgcccgcttaatgtgttaaaaaagtgagaaatctatgaagaaagtcatgtgtgcactcttggtatccgggctgctggccggttttgctgctcaggcagcggacgatggcattacccgcgttcccgttttaacgcgcgaccaggcgaacgtattattgaaaaaagcggaagataccattaagacccaccatattggtggcgctgtggctattgttgatgccgctggacaattaattacctttgatcgtttggacggtgcaacgcctgcgaatattgtactggcgcctgagaaagccaagacctcggcttatttcggtcagccaactgagtcttatcagcaaaaagtttctcagggtaatttgcttatattaggcaacccacgtattttacctttctctggcggtattccaattaagctggatgggcaggtagtcggcgctattggtgtaagcacacctgatggcaacgtggataccgaagccgctaaagccgctttaaccgcactgaaataaaaaactaaaaataaattaactattggtcgttcgcctttttagaacggcccttattcatgagcaatattatttacccatgatttaaccgcgtattaaatatcacctacctacaggggctacaatgaagaaattattactgcttgctgcattatgttctatgggcagcatgacggcttttactgccaacgccacgctgactcaaactattctttcctacagtgacgctgaaaagctgctcaccgtggcgacagataaagccaacagcctgcacgccaacgtctgtattgcgattctggatcaggccggtcaactgctggcattcaaacgtatggacaatgcgccggtaggctgcatcgactcctctattcttaaagcacgtgccggtgcgctttaccacacaccgaccgacaaatatatgggccgtgccaacggctcagagcctgctatcgcaacacttcctggcatggttccattgggggcggcaacccgattgtctttaacaacaacgtgatcggctccgtaggcgttagcggctcggctaacccgaacgaaattgctatcgcgcagaccacggctgacagcctcaagtaatcctgacaccacaatgaaaaaaccccagcggaatgcatccactggggtttttttatgtcttggacgcgcgataaccgttagtggctctttttggcgtccagcttgcctttacctaggccaagcgccaggaccagcagcgcgccaacaactccggcgatggttggcaaatgagcgatggcggcaatttgcagatgggcgatagccgggtcggtgaccaacatgctgccggcaatccagccaatcagcgcgccacccagcatgataaccaccgggaaacggttgataatcgccagtaccagtttgctgcctgcgatgatgatagggatgctaatcaccacgccgagcgcgaccagaagaatattccccttaccggccgccgcgaccgccagaacattgtccagcgacatcaccacgtcggcgaccacgatggtcatcgccgtcttccacaggctggtcgcacttttaacgtcgctctcttcgtcttcgttggcaaccagcttgataccaatccacagcagcagcagtccgccaaccagcttcagataaggcagattgagcaggctgaccgcaatgatcaacaggactacacgcgccaaaatggctccggcggtaccgatgaaaatcgccttgttgcgttgatgaggcggcaatttccggcaggccatggcgataaccaccgcattatcaccgcccaacagcaggtcgattacaatgatctgtagcaggatgacgatgaaatcccattgttcaaataaccaagtcataaaacactctatgcagcgtaaaaagggaaaatcccggtaagaagcgaaacgacaatcaggatcaggctgcttacgagggaccatttaaatgtgaagtactgattctctgaataatccaacttcagcatgctgaccaccaggtaggtggaggcaaccagcggactcagaatatgcaccggctggcccatcaacgaggcgcgcgccatctcgataccgctgatgccgtgatgcttcgccgtatctgccaacaccggcagcacgccgaaatagaacacgtcgttggacaccagccaggtcatcggaatgctcagcagcgccgtcaccaccgccatatatggacccagagactgaggaatgacatcaagcaatgccgtgcctacggcgtccaccatgccggtaccgctaaacacgccggtaaacaccccggccgcaaaaatcaggctggaaacggccagaatcggaggggcatgttgttccaactgctctttctgcgcctgaatgtccggaaagttaacaatcagggccagacaggcggcaatcatgaacagatagcttaacggcaacacttcgatacataaaccaattatcaacaaaaacgttaaaacccaattaaagtagaaagtttttgtgccacggcagcggtgctgctcgtcgatcgtgttttcgaaattaaggtcaagatggttgcccagacgtgcccgctcgcggcgaccaaagatataggccaggacgaaggtccacaccgcgctggccagcagccccggcagcatcggaacgaacatatcgccgatttcaacgtgcattgacgtcgcggcccgcgcggtcggtccgccccaaggcaccatattgcccagccccgagacctgcaacagcaggcagcagaccatcggcagagacagcccgaggcgctggtagatgggcaggaaggcggagagcacgatgatgtagatagtggcaccgtcgccgtccagcgccacgataaacgccagcagcacggtaccgaggaagattttaaccgggtcgcctttgaccgctttaatgactcgcttaaccagcgggtcgaacatgccggcctcggtcatcaccatgaaatagagcatggcaaagataatcatcaccccgtttggcgcgacggtttttatgccatccatcatgaatttgccgatgtgggcgtagaaaccgccgatcagcgcgaaaacggtcggaataatgataagcgcggttagggccgaaagccgcttggtcatcaagcaaaagataaagaaaatgagcatcaatacactcaatgtcaccagcatgtttcattcctctgtaggggagagataaaaaataagattgttgcaacagtctgttagctgcttgtttcttttgggttattttcaaggattatgtcagtaacagggggttaagaatggcttctggttttatgaatagattcctgaagggaatgataggcccttcaacttatgttgataatttaaactaaaaacgtaccagtaggttcatatttccctgttgaccttgataatagggacttttaggaaaattcgcagcaagggtttcagcctatttttggcatcgggagagggcgttgggtgggtttttgcaaggtaaatggtgtttcgagtttgtgagcaatgacaaataattcaaacgagctataggaggtttcaggcataaaaaagccccgacaaatacgccgaggctgttgatatatgggctagatcacactttcatcacgcgctgaaagctgtctcgccgggcattattccatgcccaattcttttaacttgcgggtgagggtattgcgtccccagcccagcagacgtgcggcttcctgcttgtggccctgcgtatggcgcaatgcggtggtcagcaaggtacgttccatttcaggctgtgcctcggagagcaagttttgatgaccggaacgcagcgcgcggtccgcccactgtgccagcagcgtcgcccagctgtcgggcagactctgtccaccggtctccggtgcgctgctctcgaacagctcggaaggtaggtcctgaatcaagacttcctgacctgcggccatcaccgtcagccagcgacaggtgttttcaagctggcgaacgttgccctgccacggcagacgcgtcagcgccgtttcggtttcaggatgcaggtttttcgcttcaacacccagctctttcgccgccacttgcaggaagtagcgcgccaaacgcgggatgtcttcacggcgctcacgcagcggcggcagatgcacacggatgacgttcagacggtggaaaaggtcttcacggaatttaccttcttgcacgcgcatctcgagattctggtgcgtcgcggcaatgattcggacgtcgaccttaaccggtgcatagccgccaacgcgataaaactgaccgtcggccaatacgcgcagcagacgggtttgcacgtccatcggcatatcaccgatttcatcgaggaacagcgtgccgttatcggcctgctcaaaacgtccctgacgaatctgattggcgccggtgaaggcccctttctcatggccaaagagttctgactcaataaggtcctttgggatagcggccatattaagcgcgataaagggggctttggcccgtggactgtggcgatgcagcgcgtgagcgaccagctctttacccgtaccagactcaccgttaatcagcacgcttattgatgaccgggagaggcgaccaatgatgcgaaacacgtcctgcatcgccggtgcttcaccgatgatgtccgccgtcggcccgctggccggttggctgcgtgcaggctgctgctgttcctgatagtggctgatggcacgctcaaccagtgcaaccgcctcatcgatatcaaaaggcttcggcagatagtcgaaagccccttgctgataagcgctcactgccgcgtccagatccgagtgcgcggtcatgatgatcaccggcaacatcggatgacgttgtttgatttgttttaacagcgccaacccgtccatgccgggcatgcgaatatctgataacaaaacgtcaggggtttgagtcgcaatggcatccaatacttcattgccgctgtcgaacgtggtgcagtgtaaacccgctccagtgagcgcgcgttcaagtacccagcggatggagctatcgtcatcgacgatccagactatccctcgttgcataagaacctcactggcgaataggcaggaagaccgagaattcggtgtgtcctggccaactgttaaattcaactttacccgaatgctgatcaatcaaactgcgcgcgatggacaggcccagacctgtacccccttcgcggccactgaccatagggtaaaaaagtgtatcctgcagatgcgcagggacgccgggaccgtcatcttcaatatcaatgcgggccaccaggcgatagcgcacaccgtgcagggtaatctggaatgcggttcgcgttctcagcgtgatagtgccgccttcctctcccaatgcctgcaaggcattccgggtaatgttgagcaggatctgctctatttgatccgggtcgtgggccagttccggcaagcttggatcgtaatccctgaccagctgcacgttgtccggcttctccatcgacaccagttggcaaacccgctcggcaacctggtggatgctctgcgtaatatgctggcttgggcgctgtgggcctaacaaccggtcaaccaggttacgtaatctgtcggcctgctcgataatgaccttggtatactccaggagggcgggatcggggagcgcctttgacagcagctgcgccgcaccgcgtaaaccacccagcggatttttaatctcatgtgccagcccgcgaatcagatcccttgcggcgacctgctgtgcgtgctgaagctgttcctgactcaggcgacgctggttatccatcggcgccagttcaatcaaaataaaaccttccggcaaagcctgtgcggtcagcgacataatgtgtgctcgaccatctaccaccagagtcacttcgctgtcggtaaatccttgcccagcctcgatactttcgcgcatgagctcaatgttgagcgaaaagtagcccaccagatcgggtaacggtgtcccgaaaagcttgcgtgaactctgcgctaataattgctgagccgccggattggcgtaatgcacggccaattcttcgtccaacagcagaacgctgttgataagggaattgaggatctgcccagcatcgggcagcttgccagttgccatacagcagtctcccgcacctgattggtgcattttaaccgcctcccgccaaacaagtcgggacagtggtgtaacacaggaaagattcgtggagaaaaaagcccatccggagatgggcttagattttccacggcaacaaaaaatatttcgatatttttgttctgcgccacgaacggggttcgggcacagtcagctaagctcggggagaggacccaacctctcccttgcgctacggcgaattagacgctgtagtacagttcgaactcaactgggtgtggcgtcatgcgcacgcggtcgttctcttctttacgcagattgatgtaagcatcaattgcgtcgtcggtgaacacgccaccgcgggtcaggaactcacggtcagcgtccagttcgttcaacgcttcttccagtgaacctgcaacctgtgggatctctgccgcttcttctggtggcaggtggtacaggtctttgtccatcgcatcgccaggatggattttgttgatgatgccgtcgaggccagccatcagcagggcagcaaacgccaggtatgggttagccgctgggtctgggaagcgagcttcgatacgcatagctttagggctagaaacgtgtgggatacggatagaagcagaacggttacgcgctgagtaagccagcataactggcgcttcatagcccgggaccagacgcttgtaggagttggtggttgggttggcataagcgttgatggctttagcgtgcttgatgataccaccgatgtagtacagtgcagtctcagagaggccgccatatttgtcgccagagaacaggttgttaccgtctttggacagagacatgtggcagtgcatgcctgaaccgttatcgccaaacattggttttggcataaaggtcgcagttttaccaaatgcgtgagccacgttgtgaaccacgtatttgtagatctggatttcgtcagcttttttggtcagggtgttgaagcgagttgccacttcgttctggccagcggtggcgacttcgtggtggtgagcttcaactaccaggcccatttcttccatggtcagacacatggtagaacgcaggtcctgagaggagtcgaccggaggaactgggaagtaaccgcctttcactgctggacggtggcctttgttgccgccttcgtatttggtaccggtgttccatgcgccttcgatatcgtcgatagcaacatgagaacctgcgatgctgctgccgaagcgcacgtcatcgaacaggaagaattctggctcaggtccgaacagaacggtgtccgcgatgcctgaagatttcaggaagtcttcagcacgttttgcggttgaacgcgggtcgcgatcgtagccttgcagcgtgtttggctcaacgatatcgcaacggatgatcaaggttgattcttcaaagaacgggtcaagaaccgcggtgctcggatctggcatcaataccatgtctgagtcgttgatagttttccagccaccgatggaagaaccatcgaacattttaccatcttcgaagaagtctgggctcacctggtgagcagggatggtaacgtgctgttctttacccttggtgtcagtgaagcgaaggtcgatgaatttaacttcattttccttgataatcgcaaaaacgtgttcagcggacatactagttctcccgaatttctcattatgtcatcgtcgtggaacgaaacgaataaacaaacattgttgaaaatggcgtgtggcctaaacagctttattagttgctctgataagactcttttcaccctggatgattgattgcgaaatctgtgccaactttgtgaaaagggtgtgaatgccattttacgcgggttgcatggttattcagtatgcaccataacaggaaatgtgcaccattttggttcaataatgcgaatgtggtgaaccattttggtgcaccattttgggtcaagggggattttgcaccgtgaaagggatcgcaaagtaaccatacagaacttgtttgcaagagtttcttgtgaacttgtttagaacctagcctaatacgtgtacaatagcgcgctatttctatatttctaaatgcctgaggcaaagctgtgatcgaaaatttgcgtaacatcgccattattgcccacgttgaccatggtaaaactaccttggttgataagctgctacaacaatccggtaccttcggagaacgtgtagaagccaccgaacgcgtaatggactccaacgatttggagaaagagcgtgggattaccatcctcgcaaaaaacaccgccattaattggaaagactaccgcatcaacatcgtggataccccaggacacgccgacttcggcggtgaggtagagcgtgtgatgtcaatggttgactcggtgctgctggttgtggatgcaatggatggcccgatgccgcaaacccgtttcgtgaccaaaaaagcatttgctaatggtctgaagccgatcgtggtaatcaacaaggttgaccgccctggcgcgcgtcctgactgggttgttgatcaggtattcgacctgttcgttaacctggacgcaaccgacgaacagcttgatttcccaatcatctatgcatctgcactgatgggtatcgcgggtaccgaccataatgatatggccgaagacatgactccgctgtaccaggctatcgttgaccacgtgtctgcgcctaaagtagaagttgaagcaccgttccagatgcagatttctcagctggactacaacaactacgtaggtgttatcggtatcggccgcatcaagcgcggtaccgttaagcctaaccagcagatcactatcatcgatagcgaaggcaaaacccgtaacggtaaagtcggtaaagttctgacccacatgggtcttgagcgtatcgaagcgaccgttgccgaagctggcgacatcatcgctatcaccggtctgggcgagctgaacatctccgacaccatctgtgatccacagaatgtcgaagcgctgccagcactgagcgtcgatgaacctaccgtgaccatgtacttcaacgtcaacacctctccgttctgtggtaaagaaggtaagtttgtgacctcgcgtcagattctggaccgtctgaacaaagagctggtgcacaacgtggcactgcgcgttgaagaaaccgaagactctgacgcattccgcgtttcaggccgtggtgaacttcacctgtcggttctgatcgaaaacatgcgtcgtgaaggtttcgagctggccgtttctcgtcctaaagttatcaaccgtaaaatcgatggccgcatgcaagagccgttcgaaaacgtgactttggatatcgaagaacagcaccagggttcagtcatgcaagctatgggtgagcgtaaaggcgacgttaaggacatgatccctgacggcaaaggtcgtattcgtctcgattacctgatcccggctcgtggcctgatcggtttccgtaccgaattcatgaccatgacttccggtacgggtctgctgtactcaaccttcagccactacgacgacgttcgtccgggcgaaatcggccagcgtcagaacggcgtgcttatctctaacggtcagggtaaagctgttgcgtttgctctgttcggcctgcaggaccgcggtaagctgttcctgggtcacggtgcagaagtgtatgaaggccagatcatcggtattcactcacgttctaacgacctgaccgttaactgcctgaccggtaagaaactgaccaacatgcgtgcttctggtactgacgaagcaaccacgctggttcctgctatcaagatgtcccttgagcaggcgatcgagttcctggatgatgacgaactggtagaagttactcctctgtctgtacgtatccgtaaacgtcacctgaccgagaacgaccgtaaacgtgctagccgtggtcctaaagaaggttaatcttcttcccggttaaacgtttgtcgtcaagagggcacctttgggtgcccttttttttatctattttttctttatacaagccacaagcatgtattcgtgtcactgttcagacctaagatttaccgctaacctctaatgacttataaagtaagcttcatctttgaaatcaggagcgtgcaatgttgtatatttttgatatgggcaacgtgttaattgatatcgatttcaaacgtgtactgggtgtctggagcaatcttagcggtgcgccgctggctcatttaatcgagagatttaccttgggagaggtgtttcagaagcacgagcggggagaaatcagcgaccaacagtttgccgaacaactctgtcatgagatgggtattgcgctgagcttcgagcagtttagcgcaggctggcagtcgatatttatcggcgtgcgtcccgaggctatcgcgataatgaaaaccttgcgcgagcaggggcatcgcgtggtggtgctttccaataccaatcgcctgcaccttgagcactggcccgttcactatccagaaatcgagcaaaacgccgatgcgttatacttgtctcaagatttgggaatgcgcaagccggacccggccatcttcaagtatgtgctggagaaagaaggcttcacgccgcaggaggccgtattcttcgatgacgtggccgagaacgtcaacgccgctagcgcgctgggtattcaggctattttggtcaccgacagccaaacgctgccgcgtcatttcagcggcgatcaaatcacctaagtttaaaggatgaagcaatgccaaggatccatcccaaactgaagtgtgcagcccgttttagtcatatgctcctcaagcgcgccgacagcgatggattaaccctgttggcgggtcatcttgcgtatgtttctttgctttcactggttccgctgattgcggtggtgttttccctgttcgccctgtttccggtgttttcggatatcagcaaccagctgaaagattttatcttcgccaactttatgccggcgaccggcaatatcattcagcgctatcttgaacagtttgtggcgaactccagcaagatgacggccgtggggacctgtggtctgatagtgacctcgctgctgttgattgcgtccgtagacagcgtgttgaacaagatatggaacgcccacagcaagcgccccattgtttacctgtttgccgtctattggatggtgctaacgttaggcccaatcctgctggtcgccagcgtggcgataagttcctatctgctgtctctcaactggctgaacctcagcggcgtgcattcgctggtagaccatctgctgcgcgtgctgccgttgttgatttcctggatagcattctggctgctctattcaatagtgcccaaagtgcgcgttccctacggcgatgcactggtggggcactggtagccggtgtgctgtttgaactgggcaagaaaatcttcgcgctttacgtgcaactgttcccgtcctatcagcttatctatggcgtgctggcggtgatcccaattttatttctctgggtctacgtcagctggtgtatcgtattattaggggctgaaattaccgtcacgctcggtgagtttcgtgccgagcaacaagagcgggcagacgttaaagacaccgcgccgcaggagaaatagagtctttatgattgcgttaattcaacgagtattagaagccagtgtgaccgtcgacggcgaagtttgcggccagattggaccggggctattagttttgctgggcgttgagcagggcgatgacgaacagaaagccaaaaagctgtgcgataaagtcgtgggttatcgtatcttcggtgacagtgatgacaaaatgaatctgaacgtgacccaggccggtggcagtttgctggtcgtttcacagttcacgctggccgccgacacccagaaaggaatgcgccccggattttcgcgcggtgctgcacccgccgaggcagagcgtctttaccagtatttctacggtcagtgccgtgagaagggcattcctactgaaaccggacgtttcgctgcggatatgaaagtggctttggtcaacgatggtcctgtgaccttctggttgcaggtctgaagcaacggcgcaatgcctgagagagaaagtatctatgtatcacctgagagtccccgtaaccgaatcagaactggccgcttattataaatttcgttgggaaatgctgcgcaaacctctgcaccaaccggaaggttcggagcgtgatgcttatgatgccatggcgcaccaccagatggtggtcgacgaacagggcgaacccgtcgccgttggacgtttatatattaatgccgacaatgaggcgtctattcgcttcctggcggtagaccccgacgtacaggccaaagggctgggtacgctggtcgcgatgacgctggagtcggtggcgcgacaggaaggtgtaaagcgcgtggtgtgtagcgcgcgcgaagacgcggtagagttttttgccaagctgggattcatcaatcagggcgagataaccacgccgcaaaccacgccggtgcgccattttttgatgatcaaaccgatagccacgctggacgatattctccatcgccccgattggtgcgggcagctgcagcaggcctggtacgaccatattccgctgagcgaaaagatgggcgtgcggataagccagtacaccggtcagcgttttgtgaccaccatgcctgagaccggcaatcagaatccacaccacacgctgtttgcggggagcctgttttctctggctacgctgaccggctggggcctgatttggctgttgctgcgtgaacgccatctgggcggcacgattgtgctagccgacgcccacattcgctatagctcaccggtcaccggccgcccgagagcaattgctgacctcagttcgatcagcggtgatttggaccgtctggctaaagggcgcaaggcgcgcgtccagttagaggtgaagctgatgggtgaagagggggaaggtgcgatattcgaggggacttacctggtattgcccgcctcggctgatgcgcccctggagcctgcgattaactagtaaaaaagcccggcattgaccgggctttttgctattactgaattgggcctgctattccctgactcatctgctgctgaatttgcttaccctcgtttgcgctggcgtgcagtgtgccgctgagcgtcggtttaaagtcgacgttggcaggcatctggccctgaaggctcaactgcatattgacattgccctgcaacggcagtgacggccatccccagttttgcagctcgttggccggtaccgcacgcccggtcaaattcaccgagaaattacgctgcggctgctggcttacgttggccgttgcctcgagcaggccctccttggtataggcgctcaacgcggtaatcttcaccgcgtcgctgctggcttcgagtgccagagaagggcgacgcacatcgtttttgttgaaggtcgcatcgctggcgttgagattcagattcccagaccaaatcccccactggtgattttgcgccagtttaaggttagtgcctacgccgtcgagtccggtcagttggaaagggaaatcaggcgaaatatcgatgatcaggttacggtttgccgtgaacttgttgactgacacgtcagaaagccagtcgggcagcgcctcgacccacagctgacgccagttttgcggcagtgtatattccagcgaggcgatgctgagttcatcgagatttagccctttgctcgcacggtcccagtggcccatggtgcgcagtaatccgccttcccagcgggtgttaaactgccggatggcaatgccctgcggcgaaaggtcgagattcacattcgggtcgatgaagtgaagattaccgtcaatcatgtcggtagcattgagtgaaagctggccgtcggtactctgccagtctccattctccagcgtgacgtcggtgactgtcatatccaaatcggtgaacgaccagttttgcccctgaagtcgggcatcaatcaggtccagacgtttgatgtctactttcggcagcttgacgaactcctgccagaaggtcgaaatcggctgtgcgctctggagtctgatatggctcaggcgcagattatcgaccgaccagctgccgtcggtgctgcggctggcgttaccggtcaactggccgcgcgccatgtccgcaccaaaattgctcagcatcagctgtttgttatcaattctcccctgaatcaatacgttattcgctggaatattgtccaatgcaagcctgtcggcactcatttggaactgcgcattgcttcccagaaccgcattttggctcggctgccacggtgaaataccggcattgacgtttttaccatcaaccttccactgctcgatatcgccggtaagtgcaatattattcagttgcagagtattagcctgcagcggcagattaagcggttttggcgaaaggttcagcgaaccattgaccagcaccacgcggtcaaagaagtgcggctgtgtgatttgacgccaactgagatcgaaatcaacttccgcggcgttgagcacgtcaggctgattcttttcggcgaacttcacgccggatagcgtgatacgtgaaggtgccgaccacgagtggtcaatttcatctatcgaaaggcggtattcactgttaccgcttatccaacggcttagctgacccgcggcccagcgtgtttgtagcaaaacgtacagtatgacgattgccagagccaacaacagcactattgtcagcagcaatttaccgataaatttcatcgtctgggtccgtatccgttggggaaatgtacacctgtttatgccgtaatcagcaatctttctcaataggttaacatgttacaggcaaaaaaaacggcgggagggataacccttccgccgtcatagcgcgttcatttagccagcggataacaggttagggttcacgcgggaaaatcaggttcagcacgatagcggtgatgccgcccgccgcaatgcccgaagacagcagggtcttcagccagtcaggggcaaattgcaggataagcggctgctgggaaacgcccatgccgacggccagagacagcgccattatcatgattgcacgacggttaagacgttctctcgacacgatacgtacgccggatgccgcgatagtgccgaacattacgatggtcgcgccgccgagaaccggctcaggaatgtgttgcacaaagcccgccacggccgggaacagaccgaggacgataagcatcagtgcgaccacgaaaccaacatagcggctcgctacaccggtcaactggataacgccgttgttctgaccaaagcaggagttcgggaaggtattgaacaccgccgacagcatggagttcaggccattcgccagcacgccacccttgatgcgtttcatgtaaatcgggccggttaccggctgttctgagacgtctgaggtcgccgtgatatcaccgatagtttccagcgaggtcaccataaagatcagcatcagcggaataagcaggttccagtcgaaacccaggccgtaataaagcggcgttggaatagtgatcagatggcctgactctgccggtgcagtggcgggtaacatatccatgccccaggcggccagatagccgacggccatcgcaatcaccagcgacgcaacgcgcagatacgggttacgttgacgattgagcagaataatgaccaccagaaccacggcggccagaatcagatttttcggcgaaccaaaggtatggttactcatcgcggcatagccaccgccaatggaggtcaatccgacctgaataagcgaaagcccaatgatcatcaccacaatacccgataccagcggggtgataatacggcgcgccagatgcaatacgcgagacagcaaaatttcggtgcaggaggcgaccatcagggtgccaaacagggctgccatcatggttggaacggtggcgccgccgttcttcagcaccatgccgcccataatcagcggagaaacgaagttaaagctggtgccctgaatcgacagcaggcctgaaccaatcggtccccaggttttaatttgcagaatcgacgccagaccggaggcaaacagcgacatgctgataatgtgctgcgtgtcttgtgcgggcagacccagagcctggcagataagcagtgccggagtaataaccgccacgaacatggccagcaaatgctgacaggccgcaaacagcgtttgtggcaaaggtgggcggtcttctaaccgataaattagttcactgctgcgtgtcgtttccgacgccgaatgctgagcgtttggcccggcagattctgttgtcactggtggcatccccattaagccgaaagcgggcatttttcatgatattgagctcaaaagcaatcgtttgccaacggcatttatgagggataatgccgcttagagcagcatttctgagctttgagaagccataggcgggaggatccgtctttctgcagcagaatcaggcgttggtgtagcgaacgcgctctggtaaccagcgttcaatcaacgcccgtgcgtgctcgggatattgctgctgtaaatgtcgcgcgatgcgctgtacctcggggatcattgcctggtcacgcagtaaatccgcaactttaaactcggcgctgcccgtctggcgtgtccctaatagctcacccggacctcgaatttcgagatcctgctgggcgataacaaagccgtcattgctgtcgcgaagcacctgtaaacgcttctgcgccgttttgcttagcggggttttgtagagcagcacgcagtgggaagcgatagcgcctcggccaacgcgcccgcgcagctggtgcagctgtgcaagacccagacgctctgggttttcgataatcatcaggctggcattagggacatcgacgccgacctctatcaccgtcgtcgcgaccagcagctggatctcgccctgtttgaaggcttgcatcaccgcctgtttttcctgcgccttcattcggccatgcaccaaaccaattttcagctcgggcagcgcgattttcagtccttcccaggtggcttcggcggcctgtgcctcaagcatttctgattcttcaatcagcgtacagacccaataggcttgacggttctcttccatgcaggcgcttttcacccgctggataatatcgttacggcgggtatcagggatagcgacggtggtgaccggtgtgcgacccggcggaagttcgtcgataaccgaggtatcgagatcggcataggcggtcatcgccagcgtgcgcggaataggagtggcggtcataatcagctggtgcggatggaaaccctgctgtttgcccttttcccacagagccagtcgctggtgaacgccaaaacggtgctgttcgtcgataatgaccagcgccagcgccgaaaattggatttgttcctggaagatggcgtgcgttccgaccaccatcgagacctgtccgttggcaatcgcctcctgttgggcaatacgcgccttacctttctgtttaccggctagccagccaacctgaatacccagcggttcaaaccattgacggaaattattggcgtgttgctccgccagcagctcggtcggtgccatcagaccgacctgtttcccctgcgcaatagcacagagcgcggcgagtgcggcaaccagcgttttaccagagccaacgtcaccctgcaccaaccgcatcatcggatacccctgcgcgagatctttctcaatctcggcgacgacgcgattttgcgcccctgtcggactaaacgacaacgaggcgaggaaggcgttcatcaggcgatggtctttgaccagcggcagcgccttgtagctctgggttccagctcttaccgccagcatgctgagattatgcgccagtaactcttccataatcagacgacgctgcgccggatgctggcctttctcaaggtcggccagctgcatgtccggcggcggacgatgcagaagatgcagcgcctgcgacagtggcaacagtgtgcggctgagttcctgcggcaggagctcggcgataggctgggtgtcgagcagcgaaagcgcttggtttgtcagcttgcgcagcgtggcctggcgtataccttcggtcgtcggatagaccggtgtcagcgattcttgtaacacaacctcgctgttttcaccctgcacgcgatattccggatgaatgatttcagcgccgtgcgtgccgcgtttgatttcgccataggcggtaactcgccgacccggcgccagactgtttttcattgcggcgttgaaattgaagaaacgcagtgtcagcagtccggtgccgtcgctgatttggcaggtaagcatgcgtcgacgaccaaaactgatatctgtgcgcaggacttcgccttcaacggtggcataaatcgcggggagtaaatcattgattgcgtaaagacgggtacggtcctcatagcgcagaggcaaatgaagcagtaaatcctgaatcgtttcgaggccgatttttgcgagcttttctgcctgacttgcgccaacgccggtcagtgacgtaagcggaacggcatccagcaggcggcccttcatctggaaaccgtcatttgcatcgcggcccaccactcgtcatcggcgacaatattgccggtgtcatcgataagcgggcgcggcagtttcttgcgctgagcgacgttggccagcaccggataaccccttcgaacagcaggcgctgctgctctttttctttcaacaggctggtcgttcgggaatacatgccggcattttggcgctgacgctgcgcttcataaaggataagcgcagaagcgacggaaacgttcagcgactgaaccatgccgaccatcggaataatgatgtcgctgtcggcgagcgctagcgcttcgggcgtgatgccggtcttttcctggccgagcagaatgcaggttgggcgggtatagtcgatagcgcggaaatctactgctttttcagagagattggtcgccagaacctgcatccccattgccttcattttagcaacggcttcctgaatcgttttatgtgttttaacctgaacccaactatttgcgccggcagcaaaggaaccctgggtgcgcattttactggtcggccatacggcgtgaacttcattgacgccgaccgcatcagcggtacggatcactgccgaaacgttgtgcggcttgtgcacctgctccatgcagacggtcaggtcaggctggcgcgccgccagcatttcgcaaatgcgcgcataacgttcaggagtcatcagtctagtttctattacgggtgactttaatcacgtccggcatgatacgaatcttacgcatgatgtttgccagatggacgcgatcgcgggtgctcaggcgaatgaacgcgctgtagacgcgaccgtctttctcttcgctgctcaggctctgaatattcgactgcgcggcgttaatcgcggcggtcaggttcgccagtccgccctgatggttgaacatatcaaccttaatctcggcgataaattcctgctcggtttcctggtcatcccattctaccgccatgaatttctcaggctctttctggtagccacggatgttgcggcaggactcatggtgtactaccagacccttacccggactcacgtgggcaatgatcgggtcaccaggaatagggcggcagcattttgcgaaggtgatcaatacgccgtctgcgcctttaattggcagattgcgcgagccaggggtcgccatggaagactggtcgcccatcaggttcttggccaccaccagactcatggcgttgcctaaaccgatttcggccaacagatcatccatcgcactgagcttcatgcgctcaagctctttcttgatgttttctggcggaatgtcgctcagcttgcgtccacttcccagcgcatgattcaacaggcggcgacccagagagactgaatcgtcacgcttgaggttttttagcatctggcgaattttcgcacgcgctctcgagctgaccacgaagttcaaccatgctgcattcggacgcgcgcccggtgcggtgattatctcgatagtctggccgctggtcagcggttgtgaaagcgggtaaggctggcggtcgacacgcgcacccacgcaggcgtgaccgatgtcggtatgcacggcgtaggcgaagtcgacgggcgttgcgccggcaggcagctcaacgatgcggccttccggtgtaaagacgtagatttcatctgggaagaggtcggatttaacgctctcgatgaattcaaaggagttacccgcactctgctgaagctcgagcaggctctgcaaccagcgctgtgcgcggatttgcgccgtggtgccggtactttcaccgttctctttataagcccagtgtgccgccacacccatctctgccatctggtccatatcttcagtacggatctgaacctcaaccggaactccgtgagggccgatgagcgaagtatgcagagactgatagccgttggctttgggaatggcgatgtaatctttgacgcgacctggacgcggcttgtaaaggctgtgcgcctgaccaagaacgcgatagcaggtatcaagctcttttacgatgactctgaaggcataaatatccatgattgaatggaaacgctgctctttcaggtgcatcttgaggtaaatcgagtacaggtgcttttcacgcccgctaacccggcattgaataccggcttcggtcagacgtccctcaatctcggagaggattttctgaatcatctctttacggttaccgcgtgcggctttcaccacttctttgattacgcgatagcgattagggtaaagcgcctcaaaacccagctcttcgagctcggttttaaggtggtgtatacccagcctgtgcgccagcggactgtaaatttccagcgtttcacgagcaatgcggcgacgtttatcggggcgaagagagcccagcgtgcgcatattgtgggtacggtcagccagtttgatcaaaatgacgcggatgtcttgcaccatcgccataatcatcttgcggaagttctccgcttgggcttcttttttgtcgcggaatttcagcttgtcgagctttgaaacaccttcaaccagttcggcaacacttttaccaaacaactgttccatatcctggtaggttgcgggtgtgtcttcgatgacgtcgtgcaaaagcgccgccatcaacgtttcatggtcgagtctcatctcagctaaaatacaggccacggctaccgggtgagtaatatacggctcaccgctcgagcgtgtctgaccctcgtgcgcgtcccgcgcgacgaggtatgcctgcacgaggcgctttatctggtcctctggcaggtatttttgaatcagctgattcaggctttcaaagatgtacaaggctagacccgctgattaacttggacgacggccttcggcgatagcagtaaccgcttgaatctcagtggcttcttgctctttttgctcttggcgatcgcgagcgtcgaggatctggttagtgatcagaccttcttcgatttcacgcagagcaataacggtgaatttgtcgttttcttcagcgaccagtggatctttaccaccagattgcagctggcgtgcgcgacgagcagccaccaacaccaggtcaaaacggttaccaattttctctacagcgtcttgaacagttacgcgtgccatatatgtgctactccacagggtgacgaaagactgggcataatactgaaagtgtcttcagtctgccaatagtttggtgattaatccgtcatgacggagcttttgacggctcagacgaagacgttctgcacgaataatggttttgaggtcggataacgccaaatcaaaatcatcattcacaattaaatagtcgtactcggcgtagtgagtcatttcggctacggcctgcgccatacgcttggcgatgacttcttcgctgtcctgaccacggccacgcaggcggcggtccagctcgtcttttgacggaggcagaacaaaaatgctgcgcgcctgaggcatacgctggcgaatttgctgcgcaccctgccagtcgatatctaaaaatacatcaacgccagaagctaaaacctgctcaatggctttgcgcgaggtgccgtaataattaccgaacacttccgcatgttctaaaaagtcgtcgtgcgcaatcatctcgcagaattcgtctttagaaacgaaataataatgctcgccgtgtttctcaccaggcctgacttggcgcgtcgtatgagaaatagagacctgcgtatcgtagagcggttgagtttttaggtaagcctgaatcaggcttgatttacctgctccactggggcggagacaatatatagcgtgccttgaaccatgttgacgtttcagctgattgggttgaaaagaaaatacagaagagtgatcttcggcacagtatacacgttcaccgcttttggtgcagcgttacagtacatttcagcgcaagtaatcctaataaaatagcccgaagtgactcttttgcgaggcttattccattaaataagcgcaatcatgtacaccgaataaaagtttccgcaacgcctctcagcccaacttattactgttagtcattcccgccaaatgagcattgaataagcgcaacaaggagagttcttatgcgcttattttggtttattgctttgattttttgctcatttattgcggccaccgccgcagccacctcgacaccgatttgtccgccctggccgcaggggcgactagaaaatgagattgccagactctcttctcggcttgaaagctgggacgtcgaataccatcagcagggtaaaagctccatcgatgacggcatctacgataatttgcgcgacaaacagcgtttttggctgacctgtgcagataagcccgtcaccgagcccgtattgcgatcgggaaaaggtgcgttgaaccatccggttgcccataccggcctgagaaagctggcgacccgagccgatgttgcgagatggatgaaagacaaaaagtcgctgtgggtgcagcccaaaatcgacggtgtagcggtaacactaatctacaaagctgggcagctggccgctatgctcagccggggtgatggtcagtccgggcaaaactggactgagaaggcgctgaatatacgcgcaattccgcagcagattggcaacaaatccgacgtcgtcgtgctacaggggagttgttcctcatgatgaacgatcaccaacaaaataagcagggcggccttaatgcccgagctaaggtcgcgggcgcgatgatgcgtcgcacaactcctgctattttgcagcaaatcggtatttttatctgggaatggcccgacggccccgtagtgatggcaacgcgtctggagcagctcaaacagatgggcttccctctcactgccgattttacccaacccgtcactaccgtctcgcaggtgagccaatggcgcgatgactggtatcagcatccactgccttttgtcaccgacggcgtggtggtgcgtgaggcgtcggaacctgaaggtcgctactggcgtaatcgtcctgctaactgggccgttgcctggaaatatccggcgatacgtaaactcactgacgtcatcggtattgagtattcggtcggcaggagtggtaaacgcgcggtagtgctacaactgcagcccgtgactatcgatgacaagcgggtctcccgagttagcctggggtctcccagaggctgaaagaatgggatattgttattggtgatcgggtggctgtcagtcttgcaggacgaggtattccccgtcttgacgaggtggtatggcgggtcgtgatgcgagagcaaacccgtgagtcggatgagggggaaatattcgattccttcacctgctttcagcccacagggcgctgccgtgaacagttcttgtcgcgtctcgtctggctcagtggtcctcagggcttagggataaaaggcctcggaagagagacgtggagaaaactgcttgatgcccagcagattcccaccttaatcagcgggctctttctgggcgaaaaggagcttaaagctttaccggggatcggcgagaaacgggcgcagaaactttatgctcaaatacagctgtcgcgccagaaaagtttccgacagtggattaccgcactggggtttcccacggcaggacttggcatgacggaaaagaggagttggcggcagctgagagagatgacgttggagcagtggcaggctggccaggggattgggcctaaaggcgccgcgcagatacagcgttttttgcaacaccccaaggtggtcgaaattatcgaaagattacagcatgaaaggctgccggctttttatcaggccgacagcgatgacagatattcggttaatgatccgaatcaggatagttgaagacgggaagaccgagtttgaagcgcagtgccagcagtcgagcaataaagcctgccagcagggtgacgataaccaccagattctgcggcacagagaaatattgcaggatgatatacagccaagccgaggcgaaggagataccgccataaatctctttctggaacaccaaaggaatttgattgcacagcatgtcacgcaatacgcctccaaatacgccggtaatcacggctgaaatcgaggcaatcaatgggccgtgtccggtatcgagcgcaatttgggtgccaatgatcgagaacaccactaatcccagtgcatcaagcaccagaaatagcttacgcaggtgcttcatcagaggagccaaccaagtagtaacaatggctgctgcggctacgattagcacatattgcgggtgcttcacccagcccagcggatagtggcctagcaccatatctcggatggtaccgccgccaatggccgtcgcgcaggctataatgatgacaccaaagacgtccattttacggcggccagccgcgagtgcgccggtcatggcttcagcagtaataccaataatataaagaacagtgagcaacatacgtttcgccagtcgacaagatagagaaatttcctcactatagggtaataagctttgccgcgcgtctcgactgagtttttcttctgaatccccaatcggattaccttaactaatctgagtaaagcatttattcccctactgattgcattcagccgaaattaaaaaacaagttcacattactttaattttatatttttacgcattgtccattttatcgtctaggctatttttacttcactaaacaaattagctctatcttaaaggtgacgaatgtgtatatttgtcacctgttaacctaagctatagctatagcttttctatttgctggagagctacatgaaacctgaaatcccggttgtattgccacatcgtggacctgcattgcacgagcgacgtgagcagattatccgggctgcgctggaccattttcgtcactacggttattccaaaacctcagtggctgacctggcaaaagctatcggtgtttcaagcgcttatgtgtacaagttttttgagtctaagcaggcgattggtgaggcggtgtgcatgcacagcctggggcagatcgatgatgcattgcgcgagattgtgcacaccaaccaaagcgcatctgacaagctaaaagaattattttcgtcgctgctaagcaaaagcctggcgctgttttttgaagagcggaggctgcatgacattgcggctgtcgcggcgacgaatcactggagttcagcgaacaatcatcgcgctgctctatatagcatgctgaaacagatcatcgttgaaggtcgtgagaagggtgagtttgagtctgacacgccgcttgatgaggtgtgtatggccatcgcaggtgtgatgacgccattctcccaccccttgatgcttgaggaaaagacgccagagcagcttgaagagcgcgtgctggttataacgaatttggttttacgcagtctggcaaaatgacccggctgtaaaaaggtgtgttgttcacacctcaattatacggactgatccacagaggaatttttatgtctcatcgtcgtgtagtcattacgggcatgggggcggtgagcccgctcggttgtgatatcgaaactatttggaaacgactgttagccggccagtctggtattcgcgttctgccagaagaaatcgttgaaaccctgaccgttaaagtgggcggtcaggtgcaaactcttgagcaggatcccgagtcaggttttgacgcggaccagtacgtgttgcctaaagatcagaagaaaatggaccgtttcattctcttcgccatggctgctgctgagcaggcgattaccgagtcaggctggaaagcagagaccgcagaacagcaggaacgctctgcgacggtgattggctctggtatcggcggtttcccggccattgccaatgcagtacgcaccaacgacactcgtggtcctaagcgcctgtctccattcaccattccttcatttctggtgaacctggctgccggtcaggtttccatcaagcaccagttcaaaggcccaatcggtgccccggtgacagcctgtgcggctggcgttcaggctatcggcgatgcggtacgtttgattcgcaacgacgaagctgacattgcgctgtgtggcggtgcggaagcgactattgataccgtcaccatcggtagctttgcagcggcgaaagccatgtcggtcggtcatgaagacaatccagcgtctgcctcacgtccattcgatagcgcacgcgacggcttcgtcatgggcgaaggcgcaggcatgctagtgattgaagagctggaacatgcgcttgcacgcggtgctaaaccattggccgagatcgttggttacggcaccagcggcgacgcataccacatgacctccggtgcagaagacggcaacggcgcaggtcgtgcaatgaaaattgctctgcgtcagggtggcatcaagcctgagcaggttcagcaccttaacgcccacgcgacctctacgccggtcggcgacctcggcgaaatcaacgcgattaaaaaccttttcggtaccgacgacaagctggccatcacctcgaccaagtcagcaactggtcaccttttgggtgcggctggcggccttgagactatctttaccgcgttggccgtgcgtgaccagatcgtgccaccgacgctgaatctggataacaaagatccagcggccgagggtttaaacatcgttggcaacaaagcacagccgcatgaaatcacctatgcgctgtctaatggtttcggtttcggtggcgttaacgcctgcgtcttgttgaagcgctgggaagactaagtctctcccaattcaatgataaagcccgttaatccgggctttttttatgcggtattagagtccgtctggacgcgggatttcgtaatactggcccgatgggtcacgcttgtaatagtgcccttggctgacgtagaaacgctcaccgtggaaatcaaccggagaaaggtccggcggcgcagagtcatactcttcttcttcctgcggcggagatgggggcggcgcatcatcctgcggtggtgcattaacttcgacgtaattatcaccttgtttctgataataatttccgtttaaagcccaataggtcaacccaccaatcaccacggcgactgcggcatcaggcaaaatgttgaaacctggcccgccgggaccccaccgccgtgtgccaacgccaacgtaggtgaaagcaggctcagggttaatagtgatgcagcaagctttttcatttcattcccctcaggggtcaaacttcagactgatacaaacttcttccgactgatataaggtctaaacccccggcgtcaatcaatcttcaacccattttcacaagcagttacaactgcctacgctaatctcacagcgctgcgccaggctgacagagattaacggagtgtgaacgggacacaagaggacatttaaccgcaaaaaagcccgcaaatcgcgggcttttggggctttacctttcagctgcgaagcctaaaagattactcgatattctgaatctgttctcgcatctgctcgataagcaccttcagctcgatggctgaggtggtcacgtcagaattaatagatttggacgccaaggtattcgactcgcggttgaactcctgcatcatgaagtctagacggcggccaacggcttcctctttcttgaggattttatgcgtttctttaacgtgagcctcgagacgatcgagctcttcggcaacgtcaacacgctgcgccatcagcaccagttcctgctccagacggttattttcaagctgaacctgcgcgtcttccagtttgctgaccagacgttcgcgctgccacagtaagacgtttggcatctgggcgcggaccttcaccacttcggcactcacgccatcaaggcgttgctcaatcagggtcttcagtgacgcaccttcgctttcacgggccagaataaagtcgtccagcgcgcggtccagcgcaaccagcagctcattgctgatagcatccaaatcttgctcttcggcaaccatcacgcccggccagcggagcacttccagcggattaatctcgccttcatcgctctgcatcttgacccattgcgcggcttcaaccagctgtttagccagcttttcgttgagctgcagggtgccctgcgcgctagggtcgaggtcgaaacgaaggttgcattccaccttgccacgcgttagacgggcgcgaacgcgttcacgaataaccggctccagactgcgaaactgctcgggcagacggatataggtttcaagataacgctggttaacggagcgaagttcccacgctgcgcttccccagttacccttgatttcacgtcgggcataagcggtcatactacggatcatgtctgtgtacctgttaatgtaaagatgcaaggattatagcctcgctgcacccgtcatgataggcattacctcacgaagcccgtataatgcgcagccatctatgatttgcgagccggagaattaccccatgcgtccagcaggccgaaatgcacaacaagtgcgcccacttaccctgaccagaaactacacaaaacacgctgaaggttctgttttggttgaatttggtgacaccaaagtcctttgcaccgcgactgttgaagaaggggttcctcgctttctgaaaggtcagggacaaggttggatcaccgccgaatacggcatgcttccgcgttctacccacagccgtaacccgcgtgaagcggcgaaaggcaaacagggtggccgcactctggagattcaacgtctgattgcccgctctctgcgtgcggcggttgatctgaaaaaactcggtgagttcaccatcacgctggactgcgacgtcctgcaggctgacggggtacgcgtactgcttcaatctcaggtgcctgtgttgcactggccgatgccttaaacgcactggtcgccgcgggcaaactcaaagctaacccgatgaaaggtttagtggctgcggtttccgttggtatcgtaaacggtgaagcgctgtgcgacctggaatacgttgaagactccgccgctgaaaccgatatgaacgtggtgatgatggaagacggtcgtatgatcgaagtccagggcaccgcagaaggcgagccgttcagccacgaagagttgctgagcttgctgaccctcgctcgaggggtatcgatactatcttccaggcgcagaaggcggttctgggagagtaattatttaaggcgactttatttttaagtcgccttttttgtatatggccctcaggccagtaagaagattaaagaacacgaggaaaagcacctatgaaagcctaccagcgcgagtttattgagtttgcactgaacaagcaggttttgaaattcggcgaatttaccctgaagtctggccgtatcagcccctacttttttaacgcaggcctgtttaacaccggtcgcgacctggctttgctcggccgtttctacgccgaagccctgattgattcaggcatcgacttcgatctggtgtttggcccggcttataaaggcattcctatcgcgaccaccaccgttgtggcgttggccgagcagcatgagcgcgacgtgccttactgctttaaccgcaaggaagcaaaagaccacggcgaaggcggcacgttggtaggcagcccgttgcagggtaaagtcatgttggtagatgacgtgataaccgccggtacggcaatccgtgaatcgatggaaattatcaacgcgaacaatgcatctctggccggtgtgcttatttctctggaccgtcaggaacgcggccgtgccgatatttcggctattcaggaagttgaacgcgactacggctgcaaagtgatttctatcatcacgctggctgatctgattgattatctggaagagaaggcggagatggctgaccatctggcagcggttcgcgcttatcgccagcagtacggcatctaattgcgtctgaaaaggatgcaaaagaaaagggccaatggcccttttttgctttatgtctgtgacgttgaggctataccagctgcgcggcaatcagcggccagcgggtgtcgaagtcctgcgtcgggcgatatttgaattccgaacggacaaaacgcgacagcagcccttcacaaaatgccaacagctggctggcgagcagcgtttcgtcggtgctgaatccgctaccttcgcgcattttcttttcgcgtaagacctgacgtagctgaacttcaatacgctcaaaaagctgattaatgcgtccctgcaagcggtcttgttcaaacattaacgcatgcccggtcataatacgggtcaggcccggattacgttcagcaaaacccagtatcagcagaagaatgagacgaagcctatttagggtctctttctcatcctgcaggataaggttgattcgggtgatcaaactgtcttcaataaactcgatcagactgtcaaacatccgcgttttgctaggaaaatggcgataaagtgcagcctcggaaacgccgacgttggcggcaagcttggccgtagtaatacgctggctgccatcgctggactgaagcatttgtgctaacgcctgcaaaatctcctcgcgccggttccttttagtattttctttttctgccatgtctgaatagacccttgctaaaaacggctcaaatatattaaaaaccgaacaattgccgcgtaatcgagaaatttcgcggcttattgaaccttggtctttcgcgcagcaacgggcgatgccctgctattcaaaagcggtggggtatcattgagtttttattgtatcggtttgatataaataaggatctgttcaatatcctgcggccctgtaccgcgatgttgaacagattcttactggcgtcctgagtgaccaaagccaccttcgccgcgttcgctgctggtaaagtcttcaaccagattaaattcagcctgcacaacaggaacgaataccatctgggcaatgcgctcgcctggctcaatggtaaaagtggtttgaccgcggttccagactgacaccatcagttgcccctgataatcggagtcgatgaggccaaccaggttacccaataccacaccgtgcttatggcccagaccagagcgtgggaggataactgcagccagattggcatcgccgatgtgaatggcaaggccggtaggcagcagggtggtttcgcccggacgcagttcaactgcggtatccaatacggcgcgtaaatctaagcctgcagaacccggtgtggcataagtcggtaaaggaaattccttaccaatgcgcgaatcaaggatcttaatgtcgatttttttcatcataacggctgacaatctcgtttagtaaagcctggccaagctgctgtttatcgctgagaggtaaacgcagatttccattttgccaaaaaagatgcaaagcattggtattgctattaaaaccatgcccggcaagtgatacatcatttgcgcaaatcaggtcgagattcttcctgattcgtttctgttgggcgtattcttccacattctgggtttcggcggcaaacccaacaacatacggccgatgttctttcatggctgcaaccccggcgacaatatcagggttcttgatcattttcagagtgatttcatcaccctgttttttaattttttcatcggcaatcgccatagcacgatagtctgccaccgccgcgcaggagataaaaatatgctgtgaggcgacgctattgttgaccgcagcctgcatttcgagcgccgtggtgacgtcggttctttcaacgtttgcgggcgttgggagcgtgactggaccgctaatgagcgtcacctgagcaccacgcttggcggcggcctctgcgatggcaaaacccattttcccagagctgtggttgctaatatagcggactgggtccagcgcttcccgggtgggacctgcggtgaccataatcttaagatgctgcaggtcatggcgtggcgcaaaatgctcacctgccatcgcgacaatcaccatgggatcgagcatgcggcccgggcctacgtcaccgcaggcctggctgccttcatcgggaccccagacaagcgtgccacgtgccacaagctgttgcaggttttcctgcgtgatggccgcgcgatacatttgctggttcattgctggaaccactgcgaccggcgcagccgtggccaggcaaatcgtggtcagcaggtcgttcgccatgccagcgttaacgcgcgccagcagatcggccgttgcgggagcaataatgacgaggtcggcccatttgcccagttcgatatgccccatcgcggcttctgccgcggggtcgagcagggagtccgacacgggataacctgaaacggcctgaaggctaagtggcgtaatgaacgctttggcggcttctgtcatgaccacgcgcacttctgccccacggtcacgtaagcgccgtaccagctcgggtgccttgtaggcggcgataccaccgctgacgccaagcacaatatgtttgccggaaagtcccgtcatcgtgattgtccgattgtaagtccaaagaggcggtattttagcataatgcgcattcatgacagctatacgctttcgttattagcgatgcctttgctgagttttgcgagacgtatcccagggctaaatcgcagagagtcctgtgtttatcgagctgtgcaacaatcctgactcacaaggagtggaggatgaaaaggcacaataaaatctggagcagtgggacggggccgagagaaaaactgatcgagtttggcgcctccagcctgtctgactgcgagctgctggcgatatttttgcacaccggcgtacagggtatgaacgtaatggcactggccgaaagcctggtagagcactttgggtcgatttatgagattttaagggcggactacgcgtcgattgtcgggcttcacggcatgggtgcagcaaaatatgcccagctttctgccgtgaccgagctgactcagcgccgttatgcgggacagctggcatgtgaaaatgtgctgcttaaccccgctataacccgccaatatttgcagaatatgctgtcgcatcgtgaaagagaggtctttttggtactttttctcgacaatcaacaccgtgttattcgccatgaggagatgtttgctggtaccattagcagcgtcgaaattcatccgcgtgaaattgtgcgcgaagcgatgaaggttaatgcgactgcgctaattctggcgcataatcatccatccggcaaagcggaacccagttttgcggatagaagggtaaccgaacagataataaaaacgtgccaactgctggacattcgcgtactcgatcacttcgtggttgggggggtgaaacggtctcttttgccgagcgcggttggctttagacgtattttttgaagatccttagggatctttagctgttcgggacttgagcacttacgctctagagcgtatactacgccacctttgagaatcttgggtttggcgttaagagcctatctcagcaggtttcaatacccgaaagcatcttgaatgcagaaggttatgcctgatgatttatggtttttacccgacgacagtgagtcggttctcagtggagtttgctgagatgggctctcaaagcctgacgaggcggccataccctatacgaagctcgagctgatttgatttttggagaatagacacatgtcccgagtctgccaagttactggcaagcgcccggtgagcggtaacaaccgttcccacgcaatgaacgcgaccaaacgccgttttctgccaaacctgcattcccatcgtttttgggttgaaggtgagaagcgctttgtaactctgcgtgtatctgctaaaggtatgcgcgtgattgataagaagggtatcgaaacggtcctggccgaaattcgtgcccgtggtgagaagtattaaggaaaggaactgaaacatggctaaaggtgttcgcgagaagatcaagctggtttcttctgctggtactggtcacttctataccaccacgaagaacaagcgtactaagccggaaaaattggaactgaagaaattcgatccagttgtccgccagcacgtgatctacaaagaagctaaaattaaataattttagtggattaataaaaacccggctccggccgggtttttttatacctgcgattccccttcgtcattgacgctgtagctgcgttggctacattcattcaccccagccacttacctgtgtaagctcccggggattcgttcatttgccgcctggctacaactccaattacctcggggaaagcttttgtgtttgaagcattagctgcgctattaagcccatccttaggcttccccccttttgggccgctgcaagcagcgttcaaacttgctcccggcagatttgtggctacactacaccgcacattaacggtctcaggaattattcatgccagaactgccagaagttgaaaccagccgccggggtattgagccttatctggtgggtcataccattttgcacgccgtggtgcgtaacgccaggctgcgctggccgatctctcaggagattatggcgcttagcgatcagctggttatcagcgttcagcgccgcgccaagtatcttctggtcgaattgaaaagcgggtggattatcattcacctcggcatgtcgggcagtctgcgggtattgacagaggaaaccgagccagccaagcacgatcacgtagatttggtgatggataccggctatgtgctgcgctataccgacccacgtcgttttggtgcctggctgtggtgtcaggaccttgaaggcagcagcgtcttgtctcatctggggcctgagccgctcagcgaagcattcaacgccgactatctccgtgaaaaatccctcaagaagaagtcgcctatcaagccgtggctgatggacaacaagctggtggtggggtgggaaatatctatgccagcgaatcgctgtttgttgccggaatatccccggacaggccagctaactcgctctcactggaagagtatggcctgctggtatcaacgattaaagccgtactgctgcgttcaatcgagcagggcgggaccacgctgagagacttcttgcagtctgacggaaagccgggttatttcgctcaggagctgcaggtttatggtcgcgccggtgaggcttgtcgcgtgtgcggtacgccgatacaaagcagcaaacacgcgcagcgcagcaccttcttctgccctcgatgtcagcgttaatctgctgctatcttctcgagcaatgcctgagtgataggctcaggcaggaaaggcgtgatgtcccctccatgtcgcgccacctctttcaccagagaggacgaaataaacgaccactcttttgaaggcataagaaacatgctttccagcgtcggcatcagatggcgattcatgctggcaagctgcatctcatattcaaaatctgacactgcgcgcagcccacgtactaacacgttggcgttgttttccttggcaaagttagccatcagcgagctaaagccgatgacctcgacgttggcgaggtgagaggttgcctgactggccagcgccacgcgctcttccagcgtgaacagcgtcttcttgtgcggactggccgcaattgccagaatcaccttctcaaacatcaaggatgcgcgggttaccaaatccagatggccattggtcagcgggtcaaacgtccccggatagattgccttggtgctcataatggctcgcttttttgcagttgatggctgaacgcccaaagggcggcatacttgttaaaagtatactgtgcattcacgctggcgagaatcagcccttgtttaccgtcgaggaaaccggcgcgcaggatccaagttttgaagaaagctcccaaagtatggctgatgattgagaagtagctacagcgtttaccctgctcgaagcgctgctttgcccaggcttcggcatagttcatctgtttgcgctgaaaggcaaagaagtcgcgacaggtgaggtgcagcagatcgcccttgaggtcaacaatctctgccccttggacgtttaacgattcatgaaccaaatcatcgttatagcgatacttatcggccttatacaggcgattgacgcggtcgggataccagccgctatgacgcataaagcgtcctaaaaacaggttacgacggccaaggcggtaaactttattggcatccggctgttgcaaacaggcttcgatagactgacgcagttcgggagagacccgctcatcggcatcgatcatcaaaatatagtcaccggtggcatggtcctgcgcgatttgacgctgcttgccgaatccttgccagtctttattttcaaacaccttggcgccaagatgacgagccagcgacggagtgtcgtcgctgctgcctgaatcgagaaggactatctcatctgcccaactgactgacttcaggcagtcctccagcagcgaagcttcatttttggcgatcagcaccactgacagacgtttttgggcagacatgggatttagtgactccgaggggaagatagggctccatcagctgcagcaggcgctgaagcgcaccctgattttgacgcagtacctctaccgcgtggcgaccataataaagacgatagtcttcatcggtcagcagcgttgaaatttctttaaccaatgaggcgctatcgttaacggtaatcaaaccgtcggcctgcgcgagcttggcgcaaatatctttgaagttgaaggtatgcggacccatcaggaccggtatagcgtgtgccgccgcctcaagcgggttatggccgccacgctctaccagactaccgcccacgaaggcgatgtcggcaatcccgtacagcagcattagctcacccatagtgtcgccaatcacaacctgcgtttgcgccgaagggacttcgccactgctgcgttgaataaagctcatacccgccttctgggttaattcacaggccaccgggaaacgttcaggatggcgtggtaccagaatcatcagcaaattagggaaggttttcagcagttcacggtgagctgcgagcagaatcgcttcttcaccatcgtgggtgctggtggctatccatacctgacgacgagatgcccattggctgcgcagcgtcagtgcgcgagcggccaactctggggtcaccgaaatatcgaatttcaggctaccggtcactgcgagatgagaacgcttgaggccaagagaaataaagcgctctccgtcttcggcattctgtgcggcaattagggtgattttgctcatcacctttttcataaatttgcctaacttaccgtagccttttgcagagcgtgccgaaaggcgcgcattggcgataacgaggggaatgtcgcgttcatgcagggctgaaatcaggttcggccacagctcggtttccatgatgatgaccagcttcggacgaacctgatcgagaaagcgctcgatggaaccgggcaaatcataaggcagataaacgtggctgacgtccttgccaaatgcagacacagcacgctctgagccggtaggcgtcatggtggtgaccgtgatcggcagggagggatagcgatggcgtagtgccctgactaaagggactgccgcgagcgtttcacccacggaaacggagtgcaacataatgccgtccgccacgaccttacctttgcaaaatccatagcgctcagcccatctcttacgatagagcggtgctttccgaccacgcatccagagacgaacccagataattggctggatgaggtaaagaagaacggtatacagcgtttgtaacataatatccgtaaaatctaagggtaaaggcagaattctaagttttaaaccagcctaaagctattgtttattcgctaactcagcatattgctcgcagataggctgaatgccgtaatgtgtcagcttctgcgggtcgatataaggcggattggtgtaaatatctttaatcttttcagccagtgatgcgacgcttaagtctgcgagcccgcgagcgagttcaccgctaagaatttctgcgggtccgcccgggcagcgggtgctaaccaccggcgtatcgagcagcagagcctcaaccagcacgttgccaaacccctcgctgtctgagcttaaaatcagctgttgggcatggcgaatatagggatagggattggactggaagcccttgaaaataacccgttcggcgacgccaagccgttttgccagcgatttaagcttttccgtttgctctggcttgccctgacccagcaggaccagtggagcctggaccccactttctgtgtaagcctcaattaacctgtcgtgacgcttgttttcatgaaagcgccccacgtgaatcaggtatggctctcctgccagctcgcaaggttgttcagccgcggcatgaatcgctttaatatcaaaggggttgtaaatcacctcaagatgcgatgggctgaggctaaactgctgccgaatgtcgtctgcaaccgcatgcgagacggcaacgatattgcgacgctggtagaccgctttaatcttgcgctgtttcatccagcgatcgaagccggtgcgatgcccaaggtaggaggtcgaaaacataccgtgcagacagaaccagactttggtggcatctagcacgttacttttagccacgatacggtcggttttatgcaggttcgacagtaccaaatcaaaatcaccggccttacgcagtgcgtcgtccagctgacccgcgcgacgtgagagctcggtcaacttgcgccacggcttacggttctggtctttaatgactacatactccaggccttccggcagcggatactggcagacgtcgcgcagtgaaaataatgacacttgatgcccctgacgcagcataccttcagccagcgtcagcacgaccttttcggccccgccgcccggaagtccgtcgataataaacagaatgcgcatatcagcctaccagctcttggtacagtgagataagttgggacgaaagccgctgtggcgtacagtcgaggatccgctcgcgcgctttctcgccttcgctggagcccagcgcatgttttggcagcgccattaccgcctgttgcaacgccgttacgtcgagcgcatcacacacgtagccgttcacgccctgaacaataaactctgagccgccgcaggtcggtgtggtgatgattggcagcccacacgccatggcctctagaatcacgttagggaaggggtcgtagagcgttggcagcagcagaccgtcggccatttgatagaaggccagcgttgaggtttgcatgccgaagaaatgtacccgatttgcgcagcctaaagttgcacaaagcgctctgtatcgtttttcgtctttatctttacccaccaccaacagatggcgatcggtattggcgatggcttttattgccgcatccaggcccttacgctcaaagcctgaaccgacataaatcaggcaggttgcatcggcaggcacttgatattgcgcacgcagggtgaagcgttctgcctcggttggcggcaaaaatcgctgtgcgtcgatagcgttgtagatgacgcgaatcttgtcggcaggcacgccaaactcgttgatgatttcctgcttgaccatctcggcgttgcaaatcaccgcctttagctcgggagcggagtacatctgctgctcggcctgcatgacataacgatggtaacggtcgccgaaaagttgtctggctttccaggtcggcaggacgcgcgcacgttgctcgagccagcggcggtgaacgccgtcaccggcgcgatacaagtcacagcccggaatgcgctcatggctctgtactaaatcgaaatcttctttttgccacaggctgcgggccgcgttggcaaaaccgcgttcgcggctgatacgcccgagtttccacggatcgcagatgtgcaccttccaacccggtttgacctcaccctgccattggcgggtaatgacgtttagctcaagatcctgattttcgagggcttcaagcgcgcgggatacgaagcgttccgcgccaccgtctgggcggtatttttggcgcactagcgccagtctaaaatgcttcacgggagtaacctttctgccgcatcgataactgcctgagtgggaatggcatcaaggtagcgttcggatgtatgggtgtcgatatcgtcgggatcgggcaaggggccgaaatcaccggcccaaatgacttcgccctgagcctgccacggtttccagaaggtcagctttgacggcccaaacagcgcaatcagcggcgtttgcagtgcggccgccatgtgcattggcacggaatcgacaccgataaacagggcggctttatcgataagcgcggccagttgacgcagggtcaattttccggccagtgaggtgacgttagcctcagggcagagtgtgagaatgttggcgaccatctcaagctcgcgtttgtccggcccggcagtgacaacaatcggaaaacctttggccgagagggcgctgaaggtggcggccatcttctcttcggtccagcatttgaaaaaccagcgagaggtcggctgaaccacaataaatggaatcttgattccattgtcatgcagaagagcgttaacggcctgttcatcctgttctgaatagctcatggtggcctgacttaccggcgagacgatattcaagggttcgagaatagacaagttttgctcgacggtatgctgcttaccgtgatttgaggtactgaccagctgggtatggcagaatggccagactttaccgcgacgcttagggaaagcaaatcccagacgcacaggcgagcccgttagacgtgtcacgatggcgctgcgccactggtcggcaaggttgaccaccaggtcatatttgcgcttcatcagttggcgggccagtttgacctcatggcccatatgcgcacgcgcaccctgttttttccattgcctgtcgatggtaaatagctgatttaatgccggatggcttgccagcatatcgcgcgtttcgagatacaccagcatatcgatttcggcatcgggatagtgctgatgaagcgtattgataaccggcgtggtcagcaacatatcgccgtgatgacgcagtttgataataaggatacgccgtggcgagttgagaattttggttgctgaggcctgagtcatctttattcgctattcaagaatttaaggagtgattctaaaggagcctgaagaatgtggctactcttccagaccgttcttgctataggtcgaaaaatatcaaagaatagacaacaaatttggctcatggttgtccaaaaatgagtttattaaagttttcttgatgagtgggtacgtgcccgctgtcttttgattcgagatagcttcattgagtttttattgagcattttctatgactaagccagcatttatcatcactatcgatactgaaggcgacaacctttggcaaaatcacgacagtatctctaccgagaacactcgttatttgccacgttttcaggcgctttgtgaaaaatatggtttcaaacccgtctatctcaccaactatgagatggccaaggacgcgcaatacgttgaattcgctaccgacgttatccgccgtggtaccggcgaggtggggatgcatctgcatgcctggtatagcccgccacatgagccgctaacctctgacgattggcgccacaagccctatctgattgagtatcctcgagacgttattcgcgccaaggttgatcacatgaccaagcttctggaagacgcgttccagaccaaaatgctcagccaccgggctggccgttgggcgtttaatgaatattatgcttcactgctggtggagtatggctatcaggttgattgctcggtcacgccgcacgtcaactggtcgttctcgccgggtaatcctgcgggtcagggcggaaccgactatcgccacttcccgagcgaggcctatttcctcgatccggaagacatcagtcgtgccggaaagtcgccgctgctcgaagtcccgatgagcattcatctcaagcactcccgctgatgaacactctgaagcaaagttatgacgcactgcgtggaaagaagcgttcgccttcggcgctgtggctgcgcccttcgggcgggaatctcgagaagatgaagcaggttgccacgcgcagtttggcccagggccatgactacgtcgagttcatgctgcactcttcggagtttatgcctggcggcagcccgacgtttaagaacgagcaggatatcgaagtactttaccgtgacctggagcagctgtttagctggctgagcgaacgtacggtaggattaacattggctgaatattatcagcagagagtgaattaagaagatggcaaagaagttaaaaacagccttatcgaacaagtttctgcagttttacaccctcttcggcggtcgtctaaaaccgcgcgactcgtttgatccgacgcgcatcttcaccagcatcgtcatctattcgactacggcgctcggagacctgatgtttaacaccccggcgattcgggcgattaaaaaccgttatcctaatgcctttattacgctggtttcgagccataaaaataaaggtctggttgccaatagtccctatttcgacgacgtggtgtattgggacgaaaaggtacgtgatattaaaagtgtcatcaaagcattgcgtaagaatcagcccgagctggctgtcattcttcactccaaaccgccatacgacgtgatgagtgcggtgatgtccggctgtgagtacatcgttaaagatctttacggggaacgtccgaccggcgtcgagcagtggttaacccattatatggacaactttgaagggcacctcattcaacgcaagcttaatctggtgaagttcctgggttgtgataataccaatatcgacatgatgatccctgtcgatttccctaaaatcgaaaaagagccgggaaaaatcattatcggtttccagatgggcgcatcaagaccggtccgctgctggccagtgccaaaatttgtcgagctggcaaggtcactgatggctctcggtcctgagtacgaggttgcgttgattggtacccagctagagaagcctctggaagaagagttcttcagcctgctgacggaagaggaaaaacagcgcgtggtgagttacatcgccaagaccagcctgcctcagctgatgagcgtcatgaaaaatatggatgtgatggttacgggtgatacaggacctcagcatttagccgtggcgctgaaagtgaaaacggtaagcctgttcgtaaccgaagtgccacaatactgtgggccttatcaggaccctgaaattcatccggttatctggatgccggtcgatctggagaagatggataaggccgtcagcgaacagccgctgtcaatcatcagctgcgatgaggtgttgcagcacgtcaaaaccttgttgaaaattaactgatcctgtctgcgggaatgttttccccgcccctttggcattttgccaaggcccgcctgaaagaacgttctgttaatagaaaacctgatggtaatccgctttctcaaagatttggctggggatggcgctttgcaacgacaggttaacgaccctaatattcttctttttcagctgattactggcatgagtaaacgctgggacgataagatcttcgaagctttctgccaggaagctcggcagcttattgctctctgattcgtagaatcttggtttattaaagttgttcatgtcgaggccgatgatatacagctcgctgaaccctaaaaatgcggcaatttgtaacgcccaataggcaactgtgccggcatcgaacacgccgtggcggatgtcagtggtgaatccgatatcaggacgattatcggcaaacgaagcgcagcgtacgttggcgtagcagtggcccagttcggttgcaggtatcttgggctggaagattttaaacgctgcgtcttcaatcagcgccagcgagcatttgattcttgccagcgagacgcgatcaacgatgcgggcgatgccgtgggcggtggtaaacagagtgagcttcgggtcagagactatctcggcgaccatctcgggacgctggtctaaaaaccccatatcgacaatgacatagaatttgaagtcgaccgacttattcagtgaccaggcaccgtttaaccccatcgacggcagcgacggtggggttttgaagcggatatctttcaccgacggacccgtcgccgcgagcatgaccggaccactgaaggcccctgctaacgatgcaaggctgacgatagggatagcctgtccccgaaaattcaggctgatgatttctccgctgggcgcgcgggaaatcctcatataaggccagagattttcattatgtcgatatgggcgtttatgcgtatagcgataaatctgtttaaagaaggaacccacgacgaatacgctccttatccagaagttctttgacctgcacagcgctaatatctgacatcgcgttaccttgtgtcggacgacaggttgtctgattctgcccgtagcctccaatcaggccgggatccgtcggaccgtacagtgtaatgttgggtcggtccaatgcggcggtcaaatggctgaggcctgtatcgaccgagaccaccgcctgtgcgcctgcaagaatacctgcaaccttttccagactcaacttaggcagaacctcaacgtggtcgaagccttcggcaaggcgctgcgcgcgatgatattcgtgatctgcaccccagggaagcttgatccgcagtggcgtatccgccaaaagcccaatcagctcacgccagttttcttccggccagtgtttgtcggctcgcgtcgtggcatgcagaaaaacaagatacttgtcggcatcttcgggcggattgctgaggaaccgcgatgcgatggcgtaatcgccctgcgtggtcggtttctcgtagcctagactcttggcaaacagctcacgaatacgctctaccgcgtgctgctttttgttaatcgcgtgcttcttgtcatagaaccagcaggcgaacggctcgcgtgcgctcttgccgtccatgccatgcttctcgcccttggcaacgcgagtcaccagcgccgcactcttcaccagaccctgtgcgtcgataatcacgtcataagttctggattgcaggactcgtttgaaatcgcagcgttgttggcgggtatcggagccaaaccagtttttgcgccagcgacgaatggccactgggatcacccgatcaacggcgggatgccagcttgggatctgcgaaaagccttcttctactacccagtcaaacttgatgcccggcaacgcccgcattgcatcggtcagcgcaggaagtgtgtgtaaaacgtcacccatagaagacgttttaacgattaaaacctgcattccagctccttgttcgctgccaggagttgctgtagctcactgaatacctgcgtgggttgaatatcgatcaggctctgatggtagccttcggctgcatcgcctttgcggactttgtggtaaccggtgatcaaacgaataacgcgcgcctgttcactcagcggcggcgtgaaatcaggactgcttgggccgtagagcgccaccagtggcttattcaacgcggcggcgacgtgcatcaatccagaatcgttggtcacgatggcccgacaggcggcaatcagcaccacggcctggtcgagcgaggtttttccggcgatgttcagacagaaatcgcgcgcagccggtgatagcgcctcgcgaatatcttctcctgcagcatgatctttggccgagccaaacagtgcgatttgatagcctgcatcaatcagtaacgccgcaagcgcggcgtagtgatagtgcggccagcgctttgccgggccgaactcggcacccgggcaaaagccaatcagcggacgttcgccagtcagagcaaaagagtcgctgacggtggtgatttcagtttgattaaccgccagctgcggccagaggatcggctgcggcaggtcggcggccgatttaatgcgcgtggcctcatagcccagcgccgcatagcgctggaccatcagcgggaaggctgctttatcgagcttgcgaatatcgttcagcagcccgtagcgcatttctccccgccagccggtacgtttaggaatcgaggcgaaaaagggcaccagagccgacttgaatgagttgggcaaaacaaacgcctgttgataggcgtctttgcgcagcgcaacgcccaaacggcggcgttcacccagctcgagcgcaccgtgacccaacggcatcgccagggcctgattgacctccggcatcctgtcgagcagagggcggcaccacgcaggggccatcacgtcgatttctgcagcaggattattggctttgatcgtacggtacaaactctgcgacatcatcatgtcgccaacccaagagggcccaatgaccagcgttttcatctcgctaacttattcctttaaacttaacgattgagccaggccatgtactcagagacgccttctgcaacggttttgaacggcttgtcgtagcccgcgccgcgcagtgcagtcatgtctgcctgagtaaaggactggtagcgacctttcagtttttcagggaacgggatggtctcgatagcgcctttcttatggaaggcgacaacggcgtcggccacttcctggaaggattctgaacggccggttccacagttgaagatgcctgatttaccgttctgccagaaccacaggttcactgcggccacgtcgccaacgtaaatgaagtcacgtttgaagtcttcgctaccggcaaacagttttggattctcaccggccagaatctggttgttcaggtggaatgccacgcttgccatgctgcctttatggccttcacgcggtccgtagacgttgaaatagcggaaaccagtgatctgggactcggcgtgcggcagaatttcacgcacgtactggtcgaacaggaatttcgagtaaccgtagacgttcagcggctgctcgtactttctgtcttctacgaagctggtgttctggctgccgtaggtggcggctgatgaggcatacaggaacgggatgctgcgatccagacagtagtgcaggatgtctttggaatactgatagttgttgtccatcatgtatttgccatcccactcggtggtggaagaacatgcaccctggtggaatactgcatcaatgtcgcctaaatcatcaccggcaacgatgctggcgatgaagtcttctttatctacgtaatccgcgatatccaggtcgacgagattgacaaacttggtgccatctttgaggttatcaaccactaaaatatcgcgatatcccatatcattgagcgacttgataatgttgctgccgataaaaccggcaccgccagtgacgataatcatgggaatcaccttaatattaattagcgaccgcgcacgatgcccggtcattcagttgtgcatatcataccacttcatcagcgcagtcacattggtaagctatctgattagtctcagaatgcaaaagcctatgtcttcccgtgacatatgctacagaattaacatttccctgcccgatccctcgttattatgtcgctcagttagtagtctctctgttgaatgcgttatttcaggagataatctcatgtcggctttattctatcgtcggttggaagacgagctcgctcaggcacgttcggaaggactctttaaacaggaacgtatccttacctcggcgcaacaggcgcgggtcaccctcgctgacggcagccaggcactcaatttttgcgccaacaactatctgggtttggcaaatcatccacaggtcatcaacgcagccaagcagggcatggaccaacatggtttcggcatggcttctgtgcgttttatctgtggtactcaaaacattcacaaagatctcgaaaacagactggccgaatttttaggcatggaggacgctatcctctattcctcttgttttgatgccaacggcggcctgttcgaaacgctgctcggcgcagaggacgccatcatttctgatgcgcttaatcatgcctcaatcattgacggcgttcgcctgtgcaaggcgcagcggtatcgctatgccaataatgacatggccgagttgagaacgtgcctcgagcaggcgaagtccgccggcgcacgtcacattctggtcgcgaccgacggcgtattttctatggatggcgttattgccaatctgcgtggcatctgtgacctcgccgaggaatttgatgcgctagtgatggtagatgattcccacgcggtagggtttgtcggtaaagaagggcgcggtagccatgaatattgcgaggtgatggggcgggttgacatcatcaccggcacgctcgggaaggcgatgggaggggcgtccggcgggtatacggcggcccgcaaagaggtggtcgaatggctgcgtcagcgttcgaggccgtatctgttttccaactcgttggcaccttcgattgtctgcgcgtcgctggcggtgctggacctgcttgagcacggcggcgaactgcgtcaacggttgtgggacaacgccagactgttccgccacaagatggccgaggccggattccagcttgccggtgccgaccacgcaatcatccctgtgatgctgggcgatgctcagttggcacagaagtttgccagcagcttgcagcagaagggcattttcgccaccggtttcttcttccccgttgtgccacgcggtcaggcgcgtatccgcacacagatgtcagccgctcacagcaccgaggatattgaacaggccatcgccgcctttatcagcactggtaaggagttggggttctgtaatgaatgcgagaagtgagcaagattcgttttgaatgattaataacagttggcgcgaataactaaggaattttttatgaaagcattggccaagctttttcctaaacagggtatctggatgaccgaagcaccggtcccggagttgggtcacaacgatatcatgataaagatccgcaaaacggcaatctgcggtacggatgtacacatttataactgggatgaatggtcacagaagaccatcccagtgcccatggtggtcggccatgagtatgtgggcgaggtggtggccatcgggcaggaggtcaaaggtttcaatattggcgatcgcgtatcgggtgaggggcatatcacctgcggacattgccgaaactgtcgcggcggacgtactcatctttgccgcaatacccagggcgtaggcgtcaatcgcgccggcgctttcgccgagtatctggttattcctgcctttaacggcttcaaaatccctgacaacatttccgacgatttagcggccatctttgatccattcggcaatgcggtgcacaccgcgctgtcgtttgatctggtcggcgaagacgttctggtgtgcggcgcggggcctatcggcatcatggcggcggcgatttgccgtcacgtcggtgcgcgtcatgtggtgattaccgacatgaacgagtatcgcctcgaccttgcgcgcaagatgggcgtcacgcgcgcagtcaacgtcagcaaggagaatttgaccaccgtgatggccgaattggggatgacggagggctttgacgttgggctagagatgtcgggcgcgccgccggcgtttcgcaccatgcttaacgccatgaaccacgggggcgcatcgcgctgctaggcattccgccgtctgatatgtcgatcgactggaatcaggttattttcaaaggattgttcatcaagggatttacgggcgtgaaatgtttgaaacctggtacaagatggcggcgctggtgcaatcaggattggatcttaccccgctgatcactcaccattttgatatcgatgagtttcagcagggtttcgatgccatgcgttctggtcaatcgggcaaagttattttgaactggtaggggacttgccccaatcggtccattgacgctcgataaagctgaccactgacgagtttttaatactgtcgcccagcacgctaaacagtgctccggcgtaaacctgtggcaccggctgtgttaccggacaggttcgaatccccttcgctttaggcggttttggcttggccggtttcaccggcgcaggcatcggcactggccgtgggtcacggctcacggtcgcattaagcaagtcacttggccgaaccaactggatgtctggcggaagatgcgccagctcttgctgtaccaccgccacggtagtcggatgcggatgcccgatggcaatggcgaaaccattacggcgcgctaaggcaattgcgcggtcgaactgatggcgaatttcggcgtcgttttgtacatcatccaggaagacgtttcgtttaataactttaacagaggtgccctgcgccgcctgaaccgacttggtgcctgcgatagtcatgctatcgaggaagaacagatgatgcggcgccatcgcctgcatgacgttttgcataccactcaggctagaggtcatcttgctgccctgatgattattgatgcccacggcataaggaatgctggcaatcgcctggtcaacgatacgtttgacctcttggctgctcatgtcggggtcagggtattcttttctagaggttgtttgctgataggctgcatcgggagatggatcaggatttcgcggccctgctggtgggccttctccatcatctgctgcgagtcgggcgcgttcggaaaaatggccaccgatacgttaatcggcattttcagcacctgattctcgtttttcgcctggtaaccaaagtcgtcaaacagaatggccagtttggctgcctgaacattcagcgtaaataccaacgcgccgcataacgtcgctaaacgtctctttttatatcgcaatgttatcttcccaaccacggcagtgggttaacggcctgaccctgacgacgaatttcgaagtaaagggaaggctgaccttgaccgccactggtgcccacttgtgcaatcggctgaccggctttcacctgatcacccacgttcaccagtgcgctctggttatatccatacaggctcatgtctcctcggccgtggtctaccacgacaaccagaccataaccctgcaaccagtctgccagtagcacgcgtccatcggcgatggctcttacatcgctgccctcgcgagcggcaataacaatacctttgtaacgcagttccccctgtagctgttcgccaaactgatgcagcgtgctaccgcgtaccggccagaggtcttgtcccgcagggcgacccaggccgccggtgcgtgacaccagcgattgctcgctctgcgttggcttataggtggaacccttcgatttagcctgctgttctttcgcccgaacggcggcggcttcacgcgcttcctgctcggcgcgggcgcgagcggcgcgttctgcggcggcaattttatcctgcaggcgggtctggttagcccgcagaacgaccaggctttgctcgtctttctgtaatgacgactcgagcgaggtaagcgttttctgcctcgctacacgcgcctgttcgagtttctgctgctgagtttgctgatctgaaagcgccgatttctgctgtacctgtttggattgcagcgtgatgcgctgggaggcgaggtcactgcgcgtctttttcagatcgtcgatattcttttgtcgcgcctgattgaagtagctgaagtaggccagcatacgttcgctgcgttggctctcttcgccgccaaagatcagctgaagtccgctttgtttgccgaggcggaaggccgcgtcgagctgtttcgcgagcaaggcttcctgcgtcttctgctgtttttggagtttgtcgattgaggcattcaggctggcaatgtctttattgaggcctgaaagggtcagctgagtgtcgcgcagcttgcggctggcggcagcgatgatcttttcctgagactggagctggtcgagcagagatccacgttgcagcttttgagccttaacgcttttttctttttcagcaatgctttgctgaatgttcttgagttggtccttgttgtcatcggccaggctgaaccgtggctgaaccagtatcgcgccgcagactagcagtgctgaaccggtaagaacttttctcatcaaactgaaatagatagatttgctcaaacttttttccgcttgtcgacccaagatgagagacaatttgatccctgttggctttatcgtaacactaatcaacaacatgatgcgaaaacaaaaaacttcgccagcatcattcaagatagtgcgttataggctgcctgtcagtgaataaacattggtttaatgaaacgcaatgtttggaaatattttctctggacccccttgattttttcgggatgtgccgcagtttatggtaattggcggcgcattcgggctgtaattgcgcaagacgcagggtatactcgtgagccttgaatttccccttaactaacgggagttgttacaccccatgcaagatattatgccattcgttagcgcgcacccggttctgagcctggcgtgggttgcactgctgattgcggtgattttcacgactgttcgagctcgtttctcaaaagttaaagaaatcactcgcggtgaagcaacacgtctgatcaataaagaagaagctgtggttgtcgatgttcgtgctcgcgaagagttccgtaaaggtcacatttcgacttcagtgaatctgctcagcgcagatatcaaaagcaacaacctgggcgagcttgccaagaacaaggcactgccggtgattgttgtttgtgctaacggccagacttcccgtttagccgcagagggcctggtaaacgccggttttgaacgcgtttacagccttaaagaaggtatcgcaggctggagcggcgagaacctgccactggcacgcggcaagtaaagaatattccctatcttcactccatgattccgaggtgcaatatggctaagattgaaattttcaccaaagcgacttgtccttattgccatcgtgctaaagccttgctcaacagcaagggcgcagcctttgacgaaattgctatcgatggtgacgccgaaaagcgtgaggtgatgatcgcgcgcagcggccgtacgacggttcctcaggtattcatcgacggtcagcacatcggtggatgcgatgatttacatgcacttgatgcccgcggtggtcttgatcctctgatttaacgagggaagcgcaactgcgcgcaagggcgggtgttttgaaggcttattattaacttaagggtactactttcatgtcagaacagaacaacaccgagatgactttccagatccaacgtatttataccaaagacatctcttttgaagctccaaatgcaccacaagttttccagaaagagtgggagccagagattaaactggatctggatactgcttctagccaactggctgaaggcgtattcgaagttgtcctgcgtgtgaccgtgaccgcttctgtagcggaagaaactgcattcctgtgtgaagttcagcagggcggtatcttctctatcgaaggcattgatggtactcaaatggcacattgcctgggcgcatactgcccgaacatcctgttcccttatgcgcgtgagtgcatcaccagcctggtttcacgcggtactttcccgcaacttaatctggcaccggtaaactttgacgccctgttcatgaattatctgcaacagcaggcggaaagcgaaggtgcacagccacatcaggatgcctgatgaaaactgtcaatgcttcaatgaccgttatcggtgccggctcgtacggcaccgctttagccattaccctcgccagaaatggccacccggttgtgctgtgggggcataacgctgctcacatccaggcactccaggccgcgcgctgtaaccaggcatttctgcctgacgtcaccttccccgatacgcttatcctcgaaaccgacctctcgaacgcgattgccgcgagtcgtgacgtgctggttgtggtgccgagccacgttttcggtgatgtgctacgccaaatcaagccgttcttacgcgccgatgctcgcatcgtctgggcgaccaaaggccttgaggccgaaaccggtcgcctgttgcaggacgtggcccgtgaagagctgggtgatgacatcccgctggccgtcgtttcaggtccaactttcgcaaaagagcttgccgctggcatgccgacggcgattgcgctggcctcgaccgatgctcagtttggtgaggaccttcagcaactgctgcactgtggcaaaagcttccgtgtctacagcaaccccgattttatcggtgttcagctcggcggtgcggtgaaaaacgtgattgctatcggcgcaggcatgtctgatggtatcgggtttggtgccaatgcgcgtaccgcacttattactcgtggactggccgaaatgagccgtttgggctcggcgttaggggcttccccgtcgacgtttatgggcatggcaggattgggcgatttggtgttaacctgcacagataatcaatctcgcaaccgtcgtttcggtattatgctggggcaaggtctcgacgttcagagcgctcaggacaagattggtcaggtggttgaaggttaccgcaataccaaggaagttcgcgctttggcgcagcgttttaacgttgaaatgcctattaccgaacaaatctttcaggtgctgtataacggtaaagacgcgcgtgaagccgcaaccgacctattggctcgcgccagtaaagacgagtcgggcagccgctaaaccgcaagttttaatccaccggcggaacaagccggtggattgctattctctgttgcaggccttaatttaatttgctgtaaggaatgatgatgtcgtcagaagaactggaactagtctggaatagcattaaatcagaagcgcgtgcgctggctgagtgtgaacctatgctggcaagctttttccatgcgacattactcaaacacgagaatctcggcagcgcgctgagttacattctggccaacaagctcggtagcccaatcatgccggctatcgctatccgtgaagtggttgaagaagcctaccgcaacgacgagcagatgaccctgtccgctgcccgcgatatcctcgccgtacactcgcgtgacgcggccgtagacaagtattcaaccccgttgctgtacctgaaaggcttccatgcattgcaggcctaccgcattggtaactggctgtggaaacaggaccgccaggcgctggcaatttacttccagaatcagatctccgtgactttcggcgtagacatccaccctgcggcacgcatcggctgcggtatcatgctcgaccacgcaaccggtatcgtcattggtgaaaccgccgtagtggaaaatgacgtatctatcctgcaatcggttacgctgggcggtaccggcaagacggttggcgatcgccatcctaaaattcgcgaaggggtgatgattggcgcgggggcaaaaattctcggcaatatcgaggtcggtgccggtgccaagattggcgctaactcggtcgtattgcagtcagttccggcgcacgttaccgctgcaggcgttccggccagaatcgtgggtcgtccagagagcgaaaagccttcgatggatatgaaccaatacttcaacgggactcaaggtttcgagttcggcgacggtatctgatacgatttcaacggcatgcgttcgcgtgccgtctcaacaccgttcacaagcggatcaggcgtctttaggcagttctttgatgaccgcgcccggataccctagctgacgccacgcctcatacaccaccactgaaaccgcattcgacaggttcatactgcgactgtccggctgcatcggaattcggattttttgctgcggcggaagactatccagaatcgtcgccggcaggccacggctttcggggccaaacagcagatagtcattgtcctgataagatacggcgctgtgcgctggcgtacctttggttgtcagggcgaacagtcggccgggattttcgctggcgagaaaagcctcatagttatcatgatgcttgatgtcggtgaattcgtgatagtccagaccggcgcgacgaagacgcttgtcgtcccaggcaaagcccatgggtttaatcaggtgtaactgacagccggtgttggcacagagcctaatgatgttgccggtgttaggtgggatttctggttcaaataaaacgatattaagcatgcgaactgcgcccctctgtctcttgagggacgcagaatagcagaatcttagcgttgctgcagcggcagccagataatcagacgtagacctcccagtgggctgtcttcggctcttacccagccacggtgctgctgaaccgccgtttcgacgatggcgaggccgagccctgttccgccagattcacggtcacgggcttcgtcggtacggtagaaaggacggaaaatctgttcgcgatcctcctcactcacacccggaccgtcgtcatcgaccataatcgtgatcccatcaccgtcggcagtaaagtttaccgcgatgtgatggtgcgaatagcgcagcgcgttgcgcacgatattctccaacgcactgtcgagtgcattaggattccctaccagtttccacgggcccggaggggcggtaacttcgagggttttgcctacctgctcggcttcgaactgagcgttatcgataacatcggcccacagctcgttggcctttaggagttcgcgggtcagctcatttttgtgctggctgcgcgacagcaccagcaggtcgttaatcataccgtccagacgctgggcctccatctcgatacgctgcaactctttgccttcgccgtggcggcgacgcatcagggccgtggcaagctgcaagcgcgtcagcggcgtgcgcagctcgtgggaaatgtcggaaatcagccgctgctgcgccgtcaccatcctctctagtgcactcaccatctggttaaagctggcgccggtggcgagaaactcctgcggacctgcctcaagttcagggtgctgcttgaggttgccgcgcgctacgtcgtccgccgcgtttttcagtttacgtgcgggcttggcgaggctccaggccaaccaaagcagaagaggggaacttattaacatggtgactatcagcagcagcagcggccggtcaaacatcaggttgatgaagtcggactgcgcactgcccgcaggacgaatcagataaagctggtagttgtcttccccgtcgcgtacggcgaacggcccaaccatctcgacgcggccatatttctttttcttcggcctgtccgagttgtcggactggccgataaagttacgtacgatctgcatttcattacgctgtgcgccgatcacccgaccttcactggtgaccagcaacaggcgttgacccggtggtgcccatttatcgatggcgcgaaaaagcctgcgccaccacatcaggtcgttggccggatcgcctgcaagttccgcttcgacgtgttgttcaatcatcagcccctgacgctgctcactgtcgagcagcggggtcagttgacgtgagtcgagcttcggaaccatcaaaaccaacataagaaccagcgcgagcgtgaaccagaaaatggcaaaaatacgcgcggtaaggctgttgatcatgtagcggataccatcagatagccgcgtccacgcagggttttaaaccacggatgaccgtcctgacggtctggcagtttgcggcgcaggttggaaatgtgcatgtcaatggcgcggtcaaaaggcgtgaggcgtttgcccagcacttcttggctgagatgttcgcgtgagaccacctgacccagatgtttggccagcaggtacagcagggtaaactcggtgccggtgaggtcgagtggctgcccgccgaagctggcttcctgacggcccggattgagctgcaatccgtcgacttcgagcgttggggagctattggtttcgcccgcctgctgttgttcgctccagttggaacggcgcagcatggcgcgtatgcgtgcaaccagctcgcgatcgttaaacggcttaggcaagtagtcgtctgcgcctagttcaaggcccagcaccttatccagctcgcttccgcgcgctgtcagcataataaccggcgtctgatggcgctggcgcaattctttcaaggtttcgatgccgtttttcttcggcatcatgacgtccagcagcagcaagccgatgctgctgtccagtttttcgagcgcctgttcgccatcgtaggcgaccacaacgctaaatccttcaatctcgagcagctctttcaaaagagaagtcagttcacggtcatcatcaactaacaaaattttattcattgtgtttacctctagacgcaaaatacgtcatcaattgccgctattccatgactttacgtagttttacaagcactgacgctagtttgcagctccagggttagactgcttttcaatcattcgcgtgaagcgaaaaaatattaggagttcgtgatgtgtaaggtagctgcaatgattatggcctcaatgctgacacttagttcaagtgttgcgttggcagaaagcgctaaatctatgcctgcagatactttagctcatgatggcaatatgttggataggcgtaatacgatgttcgatggaattaatttaaccgaacagcaacgccaacaaatgcgtgatctgatgcatcaggcacgaaaagactcaccgcagattaacttaaagcaaatggaaaccatgcacgagctggtgaccgcacgcagtttcgatcaggcagccgtccgagcacaggctgagaaaatagcgcaggaacaggtagaccgccaggttgaaatggcgcgtattcgtaacctgatgtttaacctgctaacgcccgcacagaaagaagtattaaatcagaaacacgagcagcgtatggagcaactcgccgcgcaggtgtctggcgtacaaccgacttcacccctgaagacaatgagtaccgagtaaacgcccgccagggcgagtagtcagagtaaatagcatcttttccttgccatagacaccatccctgtctttccccgccttttggcggggcttttttttgtccagagataacctctggttgggaataaatgttgcgtatttgttgcattatcagtcagatgtattgatgaacaatgctatccttaagatatagggttcaatgctcaataaaacgcggtctttctcagattacgacaatttccatctaaggtttgtcacgagagggctgtataatcagaagctgtgagtaaattgcgttgaacaaaacggaattgcgatctcaggtgacctgaatcaatttcgtttaagcattttgttatatgatttgagtatccaggcttatagcccgatttttcgccctgatagggccggttttgcggcgggtatgctcaagaattcttaagaaattgcatctaaaagttcagaggtagtcatgatcaaaaaaatcggtgtactgacaagtggtggcgacgcccccggcatgaatgcggcgatacgcggcgttgttcgcgcagcgctcactgaaggcctggaggttttcggtgtttacgacggctacctcggactttatgaagatcgcatggagcagcttgaccgctacagcgtatcggatgtgatcaatcgcggcggcaccttcctgggttctgcgcgcttccctgaatttcgtgatgaagccgtacgcggcaaagccatcgagaacatgaaaaagcgcggtattgatgcgctggttgttattggcggtgacggctcctacatgggggcaaaacgtctgaccgaaatgggtttcccctgtatcggtttgccaggcactatcgataatgacgtcgcgggcaccgactacactatcggttatttcaccgcgcttgaaaccgtggttgaggccattgaccgcctgcgcgatacctcatcttctcaccagcgtatttccattgtcgaagtcatggggcgttactgcggtgatctgaccctgtctgcggccatcgccggtggctgtgagttcatcgtcattcctgaagtcgaatttaaccgcgacgatctggttgaagagatccgtgccggtatcgccaaaggcaagaaacacgccattgtcgccatcactgaacacatctgcgacatcgctgatttggcgcgccacatcgaaaccgaaaccaaacgcgaaacgcgcgcaactgtgctgggccacattcagcgcggtggtgcaccttgcgcctacgaccgcattctggcatctcgcatgggtgcctattccatcgagcttctgttgcagggctacggtgggcgctgcgtcggcgtacaaaacgagaagctggttcatcatgacatcatcgatgctatcgagaacatgaaacgtccgttcaaaaccgagatgtgggaaacggcgaaaaaactctactaatcgcctcgccactcgattaaagccttcattatgaaggctttttttatgcccatggctttatatttccaaatggaatagcaagaaagtttttattctttaatacatccgtctttctctggcaggctttatcactctgattcaatgaatctatccacataaaaaaatatttgctgggagaagcgcatgcgtaaattgggagtagggctggcactactgttggtgaccgccggagcaatggccaaagatattcagattctgaacgtgtcctatgacccaacgcgtgagctttatcaggattacaacaaagccttcagcaaatattggttggctaaaaccggcgacaacgtgaccgtacgccagtcccacggcggttcaggctcacaggcgacgtcggttattaatggcatcgatgccgacgtagtcacgctggcgctgcagtccgacgttgatgctatcgccgatcgtggtcgtatcgctaaaaactgggaaactcgcctgccggataattctgcgccttacacctcaaccatcgtgtttttggttcgcaagggtaatcctaagggcatccatgactggaatgatttgattaaatcgggcgtgtcggtcattactcctaacccgaaaacatcgggtggcgctcgctggaactacctggcggcctggggttacgcactgcatcacaataacaacgacaaagccaaggcgaccgatttcctgcgcgctctgtttaaaaacgttgaagttcaagattccggcgcacgcggtgcgaccaatactttcgttgaacgtgggatcggtgatgtactgatttcatgggaaaacgatgcgattctggcagaccagaaactggggaaaggcaagttcgaggttatctatccgagcgaatctattctggctgaaccgagcgtttctgtggtggataaagtggtcgataaacgcggaactcgcgacgtcgccgacgcctatctgaaatatctctattcccggaagggcagactatcgccgcacagaactactatcgtccgcgcgatcctgaggttgccaagaagtttgcctctcagttcccagctatcaagctgtataccgtcgagcaggttgccggtggctggaccaacgcacagaaagaacagtttgctaacggtggcatctacgaccaggttaacaagcgctgattgtcaggctgacaataaaaaaccccgcagtgcggggtttttttatgcctcaaacggacctcgacgttaatcgagatgcggcaatcaggctttagccgctgctgcggcttttactatcacggcaaaggcgtcggccttcagtgacgcgccgccgaccagtgcaccgtcgatgtctggctgggtgaacagctctgcggcgttgcccgcgttaacggaaccgccgtactggatgatcacttgctcggccacggcagcgtcttgcttggcgatgtgatcgcgaatgaacttgtgaactgcctgagcctgcgccggggtcgctgatttgccggtaccgatagcccacactggctcgtaggcaacaactgcgccttcgaaggctttcgcgcccagagtattcagcacggcgtcgagttgtttcgcacaaacagcctcagtctggcctgcttcgttttcggcttcggtttcaccgatgcacagaaccgggatcagacccgcgtctttcagcacgccgaattttttggcaatgaactcgtcgctttctttatgataagtacgacgctcagagtggccgataatgatgtatttagcgccaatatctttcagcatttcagcagaaatttcaccggtaaaagcgccagacaggttggtgtcaacgttctgggcacccagagcgatgcggctaccggacagggcgtgtttcgcctgtgacagatagacttccggcggagcgatggcaacgccacagccttcaacggtgctcaactcggtacgcaaggcggcaatcagctcattaaccatatgagtgctgccgttcagtttccagttacccatcactaatggatgtcgcattttatttactccataaggggacgcgagtgtcgattgaaatttctgccgaaagggcagataaactgcacaacagtatagagagtatcaattacaaaggctttgcttttcgtcaaatacgcagggtattaacatttataaatgactagttagccaacgctagtttgaccggttcaaccgcgagggtcagccctttctctccgttgtctgaaattacgtagcgcaccgcgccgacctgttgctggtagaacgccatcccttgcctttatcaatcaggctgttcacttttgcaacgctctgatcgaccgacagggtcgggtcaaattcgcggataacgttcgccatatagctgattgccgtggcatgtgcggccttggcgtcggggccctgaatcggcatgtaggttatctgcatacttttgattttaccggtgcctttctcgagcgcagtcgaggcatacaggtcctcgttaatcttgctggctgcacgcgttagcagggcattctcgggttggtcagcgatggcgcgaaactcaccgattggctgcgtcggattagcgatattatatttctcgcgaaaactcaccagcgtcatttcaaacgtcggcgcgcccggcatcagataaggcgctttaggttgttcttcggcggcctgatgatcgggggcggatcggcaaaagccaccccgccaccgagagtcagcatcagcagagctgacgccaggcgcaggggagggttcttttcataactgtgttcttttattttgcatagtttaccagtagtgctcgctggtcatatggcccggttttctgcgcaagtgcttgcgcatctcacgtgtgtctttgagaacctgctgcgtgtcgcgaaccatctgcgggttgccgcacagcataatatggctgtcgttggcgtccatcttcagacccacggcggcctcaagcgtaccgtcttcaatcagcgcaggaacacggcctgttagcgagcctggggtttcttcgcggctgacgaccgtctgaatgtgcagcttgccgtcataacgttgttgcagctgctgcatgagcggcagatagcttaaatcgcgcgagaagcgtgcggcgtggaccagcacgatatttttgaaacgttctaacccttttccttcctgaaggatagccagatatgggccaatggccgtaccggttgccagcatccacagggtgtcgcactcggggatttcatcaatgacgaaaaagccctgcgactctttagttatcatgatttcagcgccaggctgcatttcgtgaatgcgtgggctgagtttgccttccgggacattgaccagataaaactcgagattcgggttgctcggcgcgttcacaaaagagtaggcgcgcgtcacgcgttcaccgtctatttccagcgagagtttggcgtactgcccggcggtaaagtcattgataggcgcattaacgacgatgctgaacagactgtccgtccagtgctccactcttgttactttacccgttacccattctgccatcgactctctctccacttggtaggattgaaattaccggctgatcttattccatattttgcagaaggattatcgattaaatgttatcaggccgtggcgacaacgacctgataagggctatcagaggatgaattcgtgcagtgccgggtctttacggtccagagaatgcgtcgagcgaatacggcgcacagtgcgcgatttaccgcggataaccaaggtctcggtggtcgccagattaccctgacggctgatgccagcgagcaggtcgccctgggtaataccggtggcagaaaaaatgacgttatcgttgcgtgccatgtcgccaagcagcaggactttaccctcctcgatgcccatttgctggcagcgagacagctcgttttcgcccagacgacggttctccggcgtgtcgcctttaacgcgatgcctcgccagcaggcggccctgcatatcgccgtccagcgcacggatcaccgccgctgaaatcaccccttccggtgcgccgccgatgccgtacattacgtcgacctcgctctctggcaggcaggtcaggatagtggccgctacgtcgccgtccgggaaggcaaatacgcgcacgccaagcgtgtgcagctcgcggataatctcgtcgtggcgtggtttggccagaatggaaaccgtcagctcggtcagtggtttattaagcgctacagcaatgttgcgcaggttgtcggccagcggcaggtcgagatcaatgcatcctcttgcagcgggtccgacgaccagcttttccatgtacatatcaggtgcattcagaaacgagcctttgtcaccaaccgccagtacggccaccgcatttccctgacccatggcggtcatacgcgtgccttcaatcggatcgacggcgatatcgacggcatccccgttgcctgttcctactttttctccgatatacagcatcggcgcttcatcaatctcgccttcaccgatcacaatttcaccggcaatgtccagcgtattcagcgtgatgcgcatggcctgcacggcggcgttgtcagcaagatttttgtcgccacgccccagccatttgtaaccggcaagtgcagcagcttctgtcacgcgggagaactcgatagctaattcacgtttcatggataaatccgttttaagaaaaatgagggcggtgagcagaggctcatctcaggccacaaagtctatcatagcggggaggcagaaaagaaaaactcccggatggggagttttttagaaacggaaagcggtgagtatttattcgtgatcttcccaggcgcgtacgcgggctacggccttctgccagcctttgtagcgatagttacgctcggtggtttcgatacccggacggaactctttctcgataacggccttgctgcgaacttcatccaggtcgctccagaaaccgacggccaggcctgccaggaaagccgaaccgagcgcagtgacttcgcgcacttcagggcgttcaacgcgggtgccgagaatgtctgactggaactgcatcaggaagttgttggctaccgcaccgccgtcaacgcgcagcgactgtagacgggtaccggagtctgcctgcatcgcgtcaatgacatcacgcgtctggaaagcgatagactcaagcgttgcgcgaataatgtggttgctgttggctccgcggctgaggccgaagatagcgccacgggcatacgggtcccagtaaggcgcaccgaggccggtaaaggcaggcaccacgtaaacgccgttggtatcttttaccttcgaggcaaagtattcggagtctgcggcatcgttgatcatcttcagctcgtcacgcagccactggatagatgctcccccacgaacaccgcaccttctagcgcatagttcacttcgccgcgcggaccacaggcaatggtcgtcagtagaccatttttagaaaccacagcttcggtaccggtgttcattaataggaaacagccggtgccataagtgtttttcgccatcccaggctgtacgcaaagctggccgtaaagcgccgcctgctggtcaccggcgatcccggcgattggaatacgtgtcccgcctttacccccgatgttagtctggccgtagatttctgaggacggacgtacttccggcagcatttcacgtggaacatccagcgcttcaagtaaacggtcgtcccactccaggctgtgaatgttgaacatcatagtgcgtgacgcattggtgtagtcggtgatatgaacccgtccctgcgtcattttccacaccagccaggtatcaacggtaccgaacagcagttcgccgcgtttggcgcgctcacgtgaaccttccacgtggtccaggatccatttcaccttggtacccgagaaatacgggtcgaccaccaggccggtattatgacggatatactcttccattccgtcctttttcaactgttcacaaatctctgcggttcgacgacactgccagacgattgcgttataaattggcttgccggtttctttttcccagacgatggtagtttcacgctggttggtgataccgataccggcgatttggtcagagttaatatcagcctttgccagaacttcaaccaggacagagctttgtgaagaccaaatttccatcgggtcatgctcgacccagccagccttagggtagatctgggtgaattcgcgctgtgagacgctaacgatgttggcatcgtgatcgagcactacggcgcgtgaactggtggtaccctggtcgagtgcaacgatatattttttttcgtgtgtcttatctgctgtcatgatttatgtcctgcaaagtgggctataaacagtttaacctattaggctttacgctgagtctgctgtggcgcgtcgtctttagcggcgatggcgacagtctgaggaagatgattgctaatcagggccttgtaaccaacggcgcccaggcatgcaccaatcagcggaccgaaaataggcaccaggaagtaagggatgtcacgcgcaccggtgaaggccacttttccccaacctgcgaaataggcgaacacttttggaccaaaatcacgcgccgggttaagggcgaagccggtcaatggacccattgaggcaccgataacggcaatcagcaaaccaatcaacagcggggccaacgcgccacgcggcacaccgttaccgtcatcggtcagggccagaatcagtgacataagaacggcggtgataaccacttcaaccaggaatgcttgcagcacgctgatatgcgggtttggataggtcgagaaaatcccggccagatccaaactggcaacgctgccgcgaaccatattgtgggtctgttcaaaatcgatgaaaaggttgtagtagaggccataaaccagcgctgcggcgcagaatgccccggcgacctgagcgatgatgtacggcacgaccttgcggccttcaaagttggcaaacaggcacagagcgatagtgacggctggattaaggtgagcacccgagatggcggcagtcaggtaaacagccatcgagaccccaaggccccagatgatgcttatctcccactgaccaaacgaagcgcctgccagtttcagtgccgcgacacagccagcaccaaaaaagataatcaggcctgttcccagaaactcggcgatgcactggcctttgattgtggaactcatattttggctcataatcgaatcctataaaggatagttgttaagggtagggtttaaatcactttgttttattgtttagtgttatttaatttttacatctcagatcgtatgagtatgtaatgtgaatttatcgttaacgagcataaacgagaaataccgaaatcaaaatgtgtgtgctgtgtcataaaaatgagcgaatacgcgtgtttttaagaaactggctgaccgaaaaaatgaatgctttgcgctaaaactagcgaatttactgaccgatcgctgcgttctttcagcttttcctgatagtcacgccatgataattgcaacagactgcgtgcagggccagtatgttgctagacagcgaagggatgcctacatacaatcggggttaattgaagccgcagtgttaattacagttgtagttaattgaattatcgagctgcgtcgggaagatgcggcgagtcttataagatgtacgccttgcgaacataaggggaataaacatgtcatttgaagtctttgagaaactagaaactaaagttcagcaagcgattgataccattactttactgcagatggaaatcgaagagcttaaagagcagaacaacagcctgtctcagcaggtacagcaggcgaacggtaaccacgagtcactggttcgtgaaaatgcgcatctgaaagaagagcagcacgtttggcaagagcgtttgcgctcacttctcggaaaaatggaagaagtctaatccactgagtccttgaagctgcacgccgtcagcggcgtttattcacccgaatcactgacttatgtcggctcatcgggaatcgattcgctcgctgccttgttgcgactccaatgactctgcggacgtagtgttctacttttccaaaataaaaaagacgcattttgcgtcttttttgttgcctaaaaagcgagagattactcgatatcgagcgggtcctctgacagcacgatgccggtgttgtcggcgtacaggtggtcacccgagaagaaggtcacgccaccaaagtttacgcggatatcgctttcgccaatcccttcgctcgcggcccccgccgggatagcggccattgcctgaatgccaatatccagctcttcgaggtcatcaacctgacgcacagcaccgtaaatcactatgccttcccactcgttttgcagcgccaggtttgccagtcctgcatcaagcagggcgcgacgcaccgaaccgccgccgtctaccagcagaacacggccacggccattttcttcaagcagatcgtagagcaagccattatcttcaaagcatttcaccgtggtgatttgcccaccaaatgaagtacgtccaccaaagttggagaacaggggttcaacgacattcacttcttcatgataaatgtcgcatagttctgaagtatcgtatttcataggatttttatctggttgctcgctggtgctttcagtatatccctttctggcagatgttggcaaaatcatcaattctttacgttttgactttccgtatctacctcatgccgagggacgtggggcaagaaaaagggaggccgaagcctccctgattttctgtatcatgcacataacaccattacagaataaagcggctcaggtcttcgtcggcgaccagtgcatcaaggtgattgcgcacatagtcggcatcgatgatcaccgtcgtgccgttgctttcgctggcatcataggagatgtcttccatcaaacgctccagcacggtatgcagacgacgagcaccgatgttctcggtggtttcgttaacctgccatgcggcttctgcgatgcggcgaataccgtcttgggtaaactcaacggtcacgccttcagtctgcatcagcgctttgtactgatgagtcagtgacgcgcttggctcggtcagaatacgctcgaagtcttcggtagacagcgcctgtagctcaacgcggataggcagacgaccctgaagttccgggatcaggtccgaaggattggcagtctggaacgcgccggaagcgataaacaggatgtggtcagttttgaccataccgtgtttcgtcgaaacggtgcagccttctaccagaggcagcaggtcgcgctgcacgccttcgcgagacacgtccgggccggagctctggccgcgtttacagattttgtctatctcatcgatgaacacgataccgtgttgttcaacggcttcaatcgcctgttctttaagctcttccgggttaaccagcttggcggcttcttcttcaaccagcagcttgtaggcttccttgattttcagcttacgcgctttctgtttctgtcccgccatgttctgaaacatagactgcagctggttggtcatctcttccatgccgggaggtgccatgatttctacgccagccggagtatcggcgacgttgatctcgatttctttatcgtcgagctggccttcacgcagttttttgcggaaagactggcgtgcggcagaaggctctttggcctcatccggctggccccagttgttcttggccggtgggataaggacgtcgaggatgcgctcttcagccatctcttctgcgcggtaacggttcttctcgatagactgctgacgcaccattttgatggcagaatcggtcaggtcacgaatgatggaatcgacttctttaccgacatagcccacttcggtgaacttggtggcttctaccttgataaacggcgcgttggccagtttcgccagacggcgagcaatctcggttttaccgacaccggttgggccgatcatcagaatgtttttaggcgtgacttcgtggcgcagcgcttcatcgagctgcatacgacgccagcggttacgcagcgcgatggcaacagcgcgtttcgcattgtgttgcccgatgatgtagctgtctaattcgctgacaatctcgcgtggggtcatttcagacataattttcgatccttacgctttaggattgcttaggcaattccaggaaattgaggttatggttggtgtaaatgcagatatcacccgcgatgttcagcgatttttcagcaatttcacgcgcgcttaactcggtgttttccagcagcgcagtggccgctgcctgggcgtagggaccgcctgaaccgatagcgatcagtccgttatcctgacgaataacgtcaccgttgccgctaataagcagcgaatctgtctcatctgccacgaccagcaacgcttccagacgacgcagcatgcggtcggtgcgccagtcttttgccagctcaacggcggctttggtcaggtggccctgatgcatctcgagtttgcgctcaaacagctcaaacagcgtaaacgcatcggcagtaccgccggcgaagcccgcgatcactttatctttgaagaaggtacgtactttgacgacgttacctttcatgacggtgttacccatagtggcctggccatcaccacctactacgacgtggccgttacggcgcacacatacaattgttgtcacgagctgttcctcgttgcagacggaagagatcccggcgaagttatgcaaccctgattaggttgcataaacttcgcgggccatattgaatgtatagattggggggattatgggttttcaacccccgacggggacgggaatacagctcgaaatgccagatcctttcaaacgcgacagcgtaccgtctgcgccagagcgattgttgtagggtccaatgaccacacgattccagccaccgcttgaggtgacacggctctcgaagccttcaaacgccagcttggctcgcacggattcggcctgctcggtaccgcggaaggatccacactgcacgataaagcgctgggctttttcctgctccttcggtttttccttttccggagtattctgagcgatgtcctgctgttgaggacgcgctcgttccggttttgcctgcgttatcatcggctgttgctgcacagggcgcggtttaggctgaaccggggccgcctgtggcgctctcaccggctgttgcataaacgtcggctggctgctctgctgccgtgaaaccggcgcggtccgggtcgcttgcgtcgggtcgttatacggcacttcgttcagctgagtcggtgcctggcgcatatctgcctgcatctgttccagcagctgtttctgttccggtgtgagctgagtttttgaagaaacatcgccaccggaggttggttcggtcggcgtctgcacgcccatctgacgattttccaactccttgatataacgccagcgttcctccggtttaggggaaggccattgcccggacgagggacgtgcgttggcagaatttcagcctcttccatttttttgtggctgataaaataaaggccaccgacaaagacaaccagaacggcaacggcaacggccaccacggttttggataccatcggagaactgctttttttactacggctggtggttttctttcgccgtgttcctgagcgcccacggctcacatagtctttttgtgccactatcgtttcgctgtgtcgttaggattaaagaagtacgtcattttttacagggtcctgaaaacttgactgttaactagcgcttaggcgcggcagtactgccgcgaataaccagttcactttcgagcaaacgtgaaccgctttgaaccgaatgaccgttcagttgttccagcaataataacatggcttctcggccaatctggaatctcggttgagccaccgtggtgagcggcggatcgtaaaactcactgattttaatgtcgtcgaaaccaacaatagacaaatcttgcgggatacgcagccctaatttttttgcctcaaagattgcgccgatggccatgatgtcgttatgacagaaaatggcggtcggcggtttcggctggctcatcagcgtagacagcgcctgcgcgccggattcatagctgaaatcaccgtgggcaatatactgactctccaccgattggccgttgcgtctaatggcctgaatatagccctgcaatcgatattggcacagcggcatggactccggcccggcaatgcaggcaatgcgctgatggccaaggctaatcagatagtgcacggcgtcgtaggcggcggtgaggttgtcaatgtgcaccgtcggcagttcgagttcgggtgcaaattcgttggccatcaccatcggcggcagattgcgctgctcttctttactggcatcaaacggcaggtcagaacctaacagcagcataccgtcaatttgcttggtaatgataaggttgataaaggttttttcttgctggttctgctgagcgcagtcgccaatgagcaccagatagccgttttcggcggcagtacgctcgatcccctggatcacgtcggcaaagaacggatcgcagatgtcggggacgatcactagaatagtgcgtgactcattgcgcttgagattgcgggacaaagagtgcggcgaatagccgacggcaatcaccgcctgctcaacccgttgacgggtcgatgctgaaaccttttcaggattcatcaacgctcgcgataccgtggcggtagacaccccggccatttccgccacgtctttcatggtggcggtaggaattactctattttgatccaacgcatctctccttgcacctgcatcaaactgacacgacatcatggatgtttatttttataagcttgttggcagcatccgtgcatatttaatatctatttatcatgctagcaaaaggattgcatagctcatcacattctaaacagaatgtggctaggaataatgaccaaattgcataaaaaatgtgacttctgcagttttttcgcgctggattccaaaaaaacagccgttaacgtcatcaattatcaataggatcaacatccagcgtccattttacctttttagcctgcggcaaactgccaatcagcggcattgaggtcttgataatctgctgtagcaccttgcgcgagggatgctgaatcagcagctgccagcggaaacgaccgctgcgcttggcctgtagcgcgggaacaggacccaggatccacagcgaatcatccttcagcgggctggcttcgagcaggttacgcagctgctgtagaaagagcgatgactgacggttgtcgtgatcttccgaacgaaacagcacgtggctggtgtacggcggcaaaaatacgcttttacgctccgccagcgtctgtttggaaaaggcatcgtaaccgtgctgcaacagcacctgcagcagtgggtgctcggggtggtgcgtttgcagtaccacttcgccctgtttaccggcgcgccctgcacggcccgagacctgagtatagagctgggcaaagcgttcagcggaacgaaagtcggccgaaaaaagtgcgccatcaacgtcgagcaaggaaaccagcgtgacatcggggaagtgatgtcctttcgccagcatctgggtgcctatcaggatccgtgcgccgccgcgatgcacctcggccagatgctgctccagcgagcctttgcggctggtcgtgtcgcggtcgatacgcgtgataggcgtatcaggaaacagcggcgcgagttcattctcaagctgctcggtaccgacgccaacggaaaccagctgcgtcgagccgcactgcgggcactgatgaggcaccgggcgctggctgtcgcagtggtgacagcgcagctgccgttgattctggtgaaaggtataatagtggtcgcagcgttggcactcggctatccagccgcattcgtggcacagcagagcgggcgcgtagccgcgtcggttgagaaacagcatcacctggttatcggccttgaggtgctgctgcatacgctgaatgagcggctgcgacaggccaaccttgagcggcaggcctttgagatcgagtaagtgatgcaccgccggtttggcgttaccggcgcgcttgctcagcgtcagctggcgatatttgccgagctggacgttgtgcagagtttccagagccggggtggcggagcccatcacaatcgggatgttttcggcatgtgcccgaaacacggcaaggtctcgggcgtggtagcgccagccttcctgctgtttataagagctgtcgtgttcttcgtcgatgattatcacgccgaggcgcgcaaacggggtaaacagtgacgatcgtgtgccaatcacaatcccggcctcgccgtttctggcgcgaagccacaccgccagacgttcgctgtcgttcaaaccggaatgtaatacgtcgaccggtgcgctgaaacgttcgcggaaacgagcgatggtctgcggcgtcagaccaatctccggcaccattaccagcgcctgccgaccctgcgccagaatattctccagcacgctgagatatacctcggttttacccgagccggtcaccccggccaagagccaggctgaaaactgctgatcttcgctgcggattgcgccgaccgcggtggcctgctcagtgttgagtctcaggcgctcgccgaccacgctgaagtccttacgccaatcctgtgccaccggcgcgacgctttgcaagtcggcgagccctttggcgcgcagtgcctgtagcgccgcttcgttaaggtcgagatcgctgatttgatgacggtacagtttgccttgcatcagtgccgccatggcctgctgctgcttaggtgcacgtttgaggtcgttgagcggcgtcgcacggccctgttcggtagcgaaccactgccaaagcggcgtcagttccgccggtttcccctgacggagcaggaccggcagggcgtgaaataatacttcaccgagcgggaagtgataatagtcggacgcccagtgcaacacgcgccacaggtcacgggtatacaggctggcgctgtcgagcacctcattaaccgatttaagcttttcgaggggaaattcgctgctgtcgctgacgccggtcacgatgccgatagcatcgcgtttgccgaagggaacgctgacccgacagccgggaaccacctgcataccgggggtaacaaatagtcaaatgtgcggcttaaagggacaggtagagcaacgtgagcaacgggcattggcggtccaggctataaaaaaatgacgagatagtgtacactgtgtgactcggaatgcatgaacatgattgcgcggtcactttatattctgtatgattcgccgcctttgatgcattccgcatcagagacctaatcatttacaccacgcgtggtgtccgacggcaaaacggttggatagcgacgcggcctaaacagaggttttcccatgaaacaaggtattcaccctaaatacgaagttgttactgctaactgttcttgcggtaacgttatcaaaatcggttctaccgttggtcacgacctgaacctggacgtttgtggcgaatgccacccgttctacactggtaagcagcgtgaagtggctaccggtggccgcgttgaccgcttcaacaagcgtttcagcgtaccgagcagcaaataagcttcgctcgatagcaaaaaaaggcgccggtggcgccttttttgttgcctgctatttgtgttttacgggtaaacacgtctttaaaggcaaggtttctttctacctacccggtttgcttaatattcccaggtatctggatctacacccagttcgcgcatcaggattttggcggcttccggaatttcatcactgcgttctttacgcagatcttcatcgttcggtagcggctggcccgtaaaggcatgaagaaacgcttcgcacaacaattcactgttagtggcatggcgcaggttgttcacctggcgacgtgtgcgctcgtctgtcaaaatctttaatactttcagcggaatggaaaccgtgatctttttaacttgttcgctttttttaccgtgttcagcgtaagggctgacatactcgccgttccactcagccatgggacaccttaaatttatcaaataaaaataaaattctgaaaacccggggattatgcccgatttccacagatctcactatagccatcgtccttgtaaaattctggcctgacgctgttcactttgtcagcggatgcaggttcgtgctctactgggccaggacaccgctttgcgtccgcaaatcaaggcataccgctataattttagcgggtattatcacattgctcaatctatacgcaaagaagtttagatgtccagatgtattgacgtctatcacgctaacgattaatctttacaccctcatcctctatttatcccgtcagggagcaacaactatgacgctcaagcaaggcacaatcgcggttagcagtggactcaacattgaccagcagtatggatgtgttgttcctcctattaccctttccagcacgtataatttcgaagatttcaatcagccacgcgcccacgactattcccgtcgcggtaatcctacgcgtgacgtggtgcagcgcgcattggcgagtcttgaagggggcgcgggtgccgtgctgaccagcagcgggatgtctgctattcatctggtgtgtacggtgtttcttaagccgggagatttgcttgttgctccgcacgactgctacggcggcagctatcgcctgtttgatagcctgagcaagcggggtgcctatcgcgtcctgtttgtcgaccagggtgacccagaggcattgcaggctgcgctggagcagaagcctaagctggtcctgattgaaacgccgagcaatccactgctgcgcgtggtggacatcaaggcgatttgcgacgctgcgcatgcggcaggcgcgctgacggtggtggataacaccttcctgagtccggtcctgcaacagcctctgaagctgggtgctgacttggtcgtgcattcctgtactaaatacctcaacggccattctgacgtggttgcaggtacggtgatttccaaaaccgccgagcatgcgaccgagctggcctggtgggggaacaacatcggcgtcaccggcgcggcatttgacagctatcttctgctgcgtggcctgcgtaccgtcggcgttcgcgtgaagcagcagcaggaaaatgcactggcaattgttgcttatttacagaaacaatcgttagtgaaaaagctgtatcatccttctctgccagagaatcagggccacgagattgcacgacgtcaacaaagtggttttggggcgatggtaagcttcgagtttgcaggtgatgaggcaagtttgcgtcacttcctgtctgagttaaaacttttcacgctggccgaatcattgggcggggttgagagtctgatttcacataccgccaccatgacccacgctggcatggcaccggaagcgcgtaaagccgccgggatttccgacagtctgctccgcgtttctgtcggtcttgaagatagcgaagacttaattgccgacctggaacaggctttccagtcggtcgcaaagaggtaagtaatgagtgcaatagcggttgcagcgccggcaggaagtcggcagttacataaatttggcggtagcagtctggccgacgcaaagtgttatctgcgcgtagcgggcattatggccgaatacggtaatcctggcgatatcatggtggtctctgccgcaggcagcacgacgaaccagctgattaactggctgaaactcagccagaatgaccggatttcggctcatcaggtgcagcaggcgctgcgtcgatatcagagtgagttgattaccgcactgctgccaccggaaatggctgaaccgctgattgcgacctttattcacgaccttgaacgcttggccgtgctgctcgacggcaaaatcaccgatgcagtttacgccgaggttgtggggcatggcgaggtgtggtccgcacgcctgatgtctgcgctgcttgccaaaaaggacattccttctgcctggctcgatgcccgcgatttcctgcgtgccgaacgtgctgcacagccgcaggtagatgaaggccgttcttatccgttgctgcaacagcttctggcgcagcatccgcatcaatatctggtcgtgaccgggttcatctcgcgcaatgatgcgggtgaaaccgtgctgcttggccgcaacggcagcgactattctgccacgcagattggcgcgctggcgggcgtaagccgagtcaccatctggagcgatgtcgccggtgtttacagcgctgacccgcgcaaggtgaaagatgcctgtttgctgcccttgctgcgtctcgacgaggccagcgagctggcgcgtctggccgccccggtgctgcatacccgcacgctgcagccggtctcgggtagcgatatcgatttacagctgcgctgcagctatcagccggaacagggctccacgcgcatcgaacgcgtgctggcgtccgggaccggcgccaagattgttaccagccacgacgatatctgcctgattgaggttgccgtagcgccgagccatgattttgcgctggtgcaaaaggacgtcgagctggtgctcaaccgtgcgcaggtgaagccgctcgcgaccggcgttcacgccgaccgtaatctgcttcagttctgctatacctctgaagtggtcaacagcgcgctcgccgtcctggaagaggctgcactgccgggtcggctggtgctgcgtgaagggcttgcaatggtggcattggttggcgcaggcgtgtgcaaaaatccgttgcacagccaccgtttttatcaggaactgaaagaccagccggtcgagtttgtctggcaggcggaggacggtatcagcctggtggccgtactgcgcgtcgggccgaccgagcatctgattcagggtctgcacaatacgctgttccacgccgagaaacgcattgggctgatgctgttcggcaaagggaatatcggctcgcgctggctcgagctgtttgcccgtgagcagaaaaatatctccgcacgcagcggctttgagtttgtgctggccggcgtggtcgacagcaagcgcagcctgctaagctatgacgggctggacgccagccgtgcattagccttcttcgacgatgaagcgcgtgagcacgacgaggagtcgctgttcctgtggatgcgtgcccatccttacgatgatttagtggtgcttgacgtaacggccagcgctgagctggcggaccagtatcttgatttcgccagctatggtattcacgtcattggtgccaacaaactcgccggcgcatcatgcagcgacaagtatcgccagattcgcgatgcgttcgccaagaccggcagtcactggctctataacgccaccgtgggcgcaggtttacctatcaaccacacggtgcgtgacctgcgcgacagcggcgacagtattttggccatcagcggcatcttctccggcaccctgtcatggctattcctgcagtttgacggcacgcagccgtttaccgagttggtggatttggcctggcagcaaggacttaccgagcccgatccgcgcgttgacctgtcgggtcaggacgtgatgcgcaagctggttatcctggcgcgtgaagccggttatgacattgagcctaatcaggttcgcgttgaatcactggtaccggaagactgtgcgactggctccgtcgatcagttctttgaaggtggcgaagcgctaaacgagcaaatgttgcaacgccttgaagcggccagagagatggggctggtgctgcgttatgtcgcgcgatttgatgccaatggcaaagcgcgtgttggcgtcgaagccgtgcgtgaggaccatccgttggcttctctgctgccctgcgacaacgtttttgctatcgaaagccgctggtatcgtgataacccgttggtcattcgcggacccggtgccgggcgcgatgttacggccggtgccatccagtctgatcttaaccgcttgacccaactgctttaatttcatccccctgcacaactctgctgcaggggattcttcatctccctcgcgaacttgaaattctctcaatttgagtgaagattaatcattgcccgaaactatttttgagttgactatttgaccaaaaacccgcattttctatctatacgtttagacgtctagacgcttatcaggcggcgccgataagtaaaacgatgtgatgaagaggtagagacagcatgagctttttccacgccaaccagcgcgaagcgttaaaccagagtctggccgaattacagggtcaaattaacgtctctttcgaattcttcccgccgcgaacccgcgaaatggaagacacgttgtggagctctattgaccgtctcagcagcctcaagccgaaattcgtttctgtgacttacggggctaactcaggcgagcgcgaccggacgcacagcatcattaaaggcattaaggagcgtactggtcttgaagcggcgccgcatctgacctgtatcgatgcatcgcctgccgagctgcgtcaaatcgcacaggactactggaacagcggtatccgtcacatcgtagcgctgcgcggtgatttaccgccaaacagcggcaagccagagatgtatgcgaccgacctggtgcacctgctcaaagacgtcggtgattttgatatttccgttgcggcttatccggaagtgcatccagaagcgaagagcgcacaggctgacctgattaacctgaagcgtaaaatcgatgccggtgctaacagcgcgattacccaattcttcttcgacgtagaaagctatctgcgtttccgtgaccgctgcgtatcagccgggattgacgttgagattgtgccgggcattctgccggtctctaacttcagacagctgcaacgctttgccactatgaccaacgtgcgtgtgcctaactggatgaccaacatgtttgccggactggatgacgacgctgaaacgcgcaaaatggtcggtgccaatattgcgatggacatggtgaagattctcagccgtgaagggtgaaggactttcacttttatacgctgaaccgtgccgaaatgagctatgccatttgccacacgctaggcgttcgcccaggcgtgccggcatctttagcgcagtagcgtcgttggctgctttttcatcccggtcactgacttgtatacgcttccgggaatctgttcaattacccccaacgccgctaccgttttaaagataatggcttttagccggtattacgcatgcctgcggcaacgcctgcgatagtcaccatcagcgcctgctcgacgcgggcatccagttcaccttgtgcctcaagctcgcgcgagcgatgcagcagctctgcctgaagtacgttcagcgggtcggtgtagacgttacgcagcgcgatagactcggcaatccacggcagatcagccatcaggtgatcgtcgttggagatagccagcacaaccttgatatcgttactcagctgctcgcgcagtttctggcccagcggccacagatctttgcttaccagacgctgatcgtagtactccgccagccacaaatcggccttggcaaataccatttccagcataccaatacgcgtcgagaagaacggccagtcacggcacatcgactcgagtacgtcacgtttacctgcatcaaccaccgcctgtaaacccgcacccgcacccagccacgcaggcagcatcaggcggttctgcgtccaggcgaagatccacgggatggcgcgcaggctttcgacgccgccgctggccttacgtttggcagggcgagagccgagcggcagcttggccagctcctgctctggggtcgccgaacggaagtaaggcacgaagtctttattctcgcgcacgtagccgcgatacatgttgcaggaaacctcggacagctggtccatcacctcgacccaggcctttttaggctcaggtggcggcagcaggttggcttcgagaatagcgccggtgtagagcgcgaggctgctgatggtcacttccggcaggccatatttgaagcggatcatctcaccctgttcggtgacgcgcaggccgcctttaaggctgcccggaggctgcgacagcagcgccgcgtgagccggcgcacccccgcgaccaatcgaaccgccgcgaccatggaacagcgtcagcagcacgcccgctttctcgcaggttttgattaacgcatcctgcgcacgatactgcgcccacgaggctgccataactcctgcgtctttcgccgagtcagagtagccaatcatcaccatctgtttgccctgaataaagccgcgataccagtcaatgctcagcagttgcgtcatgacggagtctgcattgttcagatcgtcaagggtttcgaacagcggcgcaaccggcatcgcaaacgggcaacccgcttctttgagcagcaggtgaaccgccagcacgtcggacggggtacgcgccatcgaaatgacgtaggccgcaatcgagccttctggcgcttcggccgcaacctgacaggtatccagcacttctttggtttcagggcttggcgtccacttgcgtggcaccagcggacgcggtgagttcagttcgcggatcaggaacgcctgtttatcgctctcggaccagctctcataatcgcccagtcccaggaaacgggttatctcggcaatggcctcggtatggcgggtgctttcctgacggatgtcgatacgcaccagcggcacgccgaagcagcgcacgcggcgcagggtatcgagcaactgtccgttggcaatgatgcccatgttgcaggcttgcagtgactgatagcaggcatacagcggcgcccacagctggtcgttgtttaccagcaggtctttaggacgcggcagggattcgcctttcaagcgggcttccagataagcctgggtcgacagcagctgagtgcgaatatctttcataatggtgcgatatggctcgacgacgtcttcaccaccggccagctcacgcagctcaggcgttgcttcggtcatcgacagctcggaaatcagtacgtggatatcgcgcaggaacaggtccgttgccttccagcggctcagctggagcacgtggcgcgtaatggcagcagtgacgttcgggttgccatcgcggtcgccgcccatccaggaggtaaagcgtaccggcacggcttcgaccggcattttgtagtcaagtgaggtttcaagctgttcgttgaactcacgcaggaaggccggaacgccttcccagaggctgttttcaaccaccgcaaagccccacttggcttcgtcgaccggcgttgggcgaatcttgcggatttcgtccgtgtgccatgactgggcaatcagctggcgcaggcggcgcataatctgcttacgctcatagtcggccagatcgttatggtcgagttgtttcaggcagttgttgatttcaacaagcttgtggatcagggtacgacgagcaatttcggttgggtgcgcggttaacaccagctcgatcgaaagctcttcaacggcgtcgcgcagctgctggtcggacagattcttcgacttcagacggtcaatcaactgggccaacgcttcagggttgctggctgcctcgccgtgcggagaaatgctgtggtattgctcggcaacgttggtcaggttaaggaactgactgaatgcacgggcaaccggaagtaattcgtcgttggataaattttgcagcgtggtcagcagttcctgacggtcggcctcattacctgcacgagaggatttagagagtttgcggattttctctacgcgatcaaggacctgctctcccagcgtgtctttgatggtctctccaagcagtttgcccagcgtgctgacattacttcgcattgcggaatattgttcgttcatattacctctgacccgtttcttgtttgatttcttatgtcttgtaaataactttcacccgtaaggcgcatttgcctctgtctatcccgccttcatggcaataatcagtcgtccaaatttagtactgtaggaagttaccgcaaaaaccccaatttccttattagaaaatcgctgaatcgagtaatcagactgaaatttaattacagccggtaggttattagtctggctaattggccgttttgtacaatatcaaagggcacctttcgatgcccctttttttgttacatatttttaacaatactaaaacgagtttagctgaattagtgatgacagaagtgatgaaccacttgagttatcagttcgcgcgtcggtttgatgaaggcggtatcgatatattcatcaggctggtgggcctgatcgattgagccaggaccgagaaccagcgtcgggcacagttcctgaataaacggcgcctcggtgcagtagttaacgatttcagtttcggttcccagcagcttctcgaccacctgcaccaggcggtgatccggcggacattcatagcccggaatcggtggatgcagcgcttcaatggtcagacggcccggccagcgactgctgacaggctcaagcgtttcgttaagcaattcgtctaaatccgacagcgtcaggcccggcagcgggcgaatatccatgtgcagttcacagcaggcacagatgcggtttgccgcatcaccgccgttgatgtggccaaagttcatggtcggataaggaatcgcaaagccgctgtggttgtagcgcgtttgcagcgtcttacgcagttccatcagatgggtgatggagtcatgcattagctcaatcgcattaatgccgcgtgaagggtcgctcgagtggcccgactggccggtgatacgaatggcgttagagatgtggcctttgtgtgcgcgcaccggttttagcgaggttggctcaccgatgatggcgcagtctggacggatggacgaggttttagcgaagtagctggcaccggccatcgtcgtttcttcatctgcggtcgccagaatgtacagcggcttgctgagcttctcggtatcgatatcacgtaatgcatcgacgataaacgcgaaaaagcctttcatgtcagcggtgcccagtccgtagagcctgttttcgtgctcggttagggtgaaggggtcgcgcgtccagcgtccatcatcgaaaggtacggtatcggtatgacccgccaacagcaggccgccagcaccttcaccaatgctggccagcatgttgaatttattgcgcgtattaggtaccggctgaatctcgaccttgaagcccaaatcgctgaaccagcccgccagcaagttgattagggtttcattgctctgatccaatgcgctgtcggtggcactgatcgaaggcgtggcgattaactcgcggtatagctcaataaaaggaggtaatttcatcttcactgttgacagcctttggttagggtaatataaatattcatgcattttatgtgaataaaaatacattaagccggttcgtaaggaaaccccaaaaacacgcaggttttggtgtgaatgtaaaagggtcgaacaggctgaatttcgcgggcttctggcgtaaaaaacgcagtgagccctctattttttaaaagaaggtgaactgagcccatgttgaatacgctgattgttggtgccaccggttatgcgggagcggaactcgcgctctacctaaatcgtcacccacatatgaacataaccggtttaacggtttcagcgcaaagtgcagatgcaggaaagttactgtccgacctgcacccgcagctgaaaggcatcgtcgatctgcctgttttacctttggaaaacgtcgcagaagccgcgaagggcgttgacgttgtttttttagccacggcacatgaagtcagccacgacctggcaccacagttcctggcggccggttgtatcgtgttcgacctctcgggtgccttccgcgttaaagacccggcgttttatactcagttctacggttttgagcatcaacaccaggactggctcgacaaggctgtttacggtttggccgagtggcaggcagacaagctgaaagaagcgcagctgattgccgtaccgggttgctacccgacggcggcccagctggctatcaaacccctgttagaaaaagacctgcttaatcaggatcagtggccggttatcaacgcgaccagcggcgtgagcggggcagggcgtaaagctagcctggggaccagcttctgcgaggtcagcctgcacgcatacggcgtattcaatcaccgtcatcacccggaaatctctacccatctggggacgccggtcatcttcaccccgcatctgggaagcttcccacgcggtattctggccaccgtgacctgccgcctgaagccaggcgtgagcgctgaacaggttgccgaggcattccagagtgcctatgccaacaaaccgctggtgcgtctgtacgaaaaaggcatgccggcgctgaagagcgtggtgggtctgccgttctgcgatattggctacgccgttcagggtgagcacgtcattattgttgcggcagaagataacctgctgaaaggggcatcggcgcaggcggttcagtgtctgaacctgcgcttcggtttcccggaaacgacgtcactggtttaagtgattgaactgaataacaattcgttagttggctaacggattgttaattttataaaacaccttcttttgagcgtttcttgatcgcctcatggatggtaaattaaagaacaattaactcccaaccaggcagcatcctcaaatgtacagggagaacggggcgtgaatatgaatccattgatcatcaagttaggcggcgtgttactggacaacgaagaagcactggagcgcctgttctccgcgttggttgcctaccgtcaggaatatcaacgcccgctggtgatagtccacggcggcggttatctggtcgatgacctgatgaagcgtctcaacctgccggtggtcaagaagtccggtctgcgcgtgacgccggcggaccagattgacatcatcaccggtgcactggccggtagcgccaacaaaacgctgctgtcctgggcggttaaaaatgacattaacgccgtgggcctgtctctggccgacgggggttccgtcagcgtcacgcagttgagcgaagaccttggctttgtgggtaaagccgaagccggttctccgaaactgattaacaccctgaccgctgcgggttacctgcccatcgtcagctctatcggcatcactgccgagggcgaactgatgaacgtcaacgccgaccaggctgcgacggcgctggcagctacgctgggcgcagacctgattctgctgtccgacgtgagcggcattctcgacggtaaaggccagcgcgtgcctgaaatgaccgccgaaagagcggagcagatgattgagcagggcattatcaccgacggcatgattgtgaaagtgcacgcggctctcgacgcagcgcgcaccttaggtcgcccggtcgatattgccagctggcgtcatgccgatcagcttccggctctgttcaacggcgaagccatcggcacccgtattctggcgtaaggccgggggctctggctccaatgacccaagccctaagaaatttataatgtaaaagcggtcggttatctcactgaaaccgacagcgaaatcagaaatttaaggaaattatcatggcagtaactaaaggcatcagcaaaattgttctcgcttactcgggcggtctggatacttcagcgatcattccatggctgaaagaaaactacggtaactgcgaagtggtggcattcgtagccaacatcggtcaggaccaggcagacctggaaggtattgagcagaaagcgctggatactggtgcgtcagaatgccacgttgtcgatctgcgtgaagagttcatcaaagactacgtttatcccgtgctgaaaagcggcgcgctgtatgaaggtacctacctgctgggcacctcaatggcacgtccattgatcgctaaagcacaggttgagctggcgctcaaagtcggtgctgacgcggtgtgtcacggtgcgaccggtaaaggtaacgaccaggttcgtttcgaaacgacctacaccgcgctggctccacagctgaaagtggtggctccatggcgtgagtgggacctgcgttcccgtgaagcgctgctggattacctgaaagtgcgtaacatcaagaccactgcgtctctggaaaaaatctacagccgtgacgaaaacgcctggcacatctctaccgaaggcggcgtgctggaaagcccttggaatgcagcgaacaaagactgctgggcatggaccgttgcacctgaagatgcgccggacgaagccgaactggtgaccatcaaggttgagaaaggcgaagtggttggcgtgaatggccaggaactgagcccgttcaaatgtctggaagcgttgaacgcgctgggcgtgaaacacggcgtgggccgtatcgacatcgttgaaaaccgtctggtaggcatcaaatctcgcggttgctacgaaaccccaggcggcaccatcatgatggctgcactgcgtggcgttgagcagctggttctggaccgcgacagcttcaaatggcgtgagcagttgggtcaggaaatgtcttacgtcgtgtacgacggccgttggttcgcgcctctgcgtgagtccattcaggcagccgccgactctctggcgcaggacgttaacggtgaagtggttgttaagctgtacaagggcaccgcaaccgcaattcagaagaaatcagccaacagcatgtactctgaagagttcgcgaccttcggcgaagatgaagtgtatgaccacagccacgcgggcggcttcattcgtctgttctccctgtcttcacgtatccgtgcgctgaacgcagccaagaaataagcgttagcaataagcgttacatcaggcgtgcgagacacctcgcatgcctgaatcatctcttcaaatatcacttcttaagcaagtaaagtcgggagcattatcatggcactatgggcggacgctttagtcaggcagcagatcagcgttttaaagaactgaatgattcactgcggtttgactatcgattggctgagcaggatatcgtgggctcggtagcctggtcgaaagcgctggtcaccgtaaatgtgctgaccgccgacgaacagcagcagctggaaggcgcgctgaacgtgttgctggaagaagtgcgtgcgaatcctcgcgctattctggagagtgatgcagaggacattcacagctgggttgagctgaagcttatcgacaaggtcggtaacctcggcaagaagctgcacactggccgtagccgtaacgatcaggtcgcgaccgacatcaagctatggtgtaaaacgcaggttgtcgagcttcagctggccgttaagcagttgcagcaggcgctggttgaaaccgccgaagcgaatcaggatgccgtgatgccgggttatactcacctgcagcgcgcccagccggtcacttttgcacactggtgtctggcctacgttgaaatgctggcccgtgatgaaagccgtttacaagatactctgacccgtctcgacgtgagcccgttgggcagcggcgcgctggcaggtacggcttaccctatcgatcgcgaacagctggctggctggttgggctttgcatcggcaacccgcaacagtctcgacagcgtttccgaccgtgaccatattctcgaactgctgtctaacgcctcaatcagcatggttcacctgtcgcgttttgccgaagatctgattttcttcaacaccggcgaagcgggctttgttgacctatctgaccgcgtaacctccggctcttcactgatgccacagaagaaaaacccggacgcgctggagcttatccgcggtaagtgtggccgtgtacagggcgcgttgaccggcatgatgatgaccctgaagggtctgccgctggcgtacaacaaagacatgcaggaagacaaagaagggctatttgacgcgctcgacacttggatggactgcctgcaaatggccgcgctggtgctcgacggtattcaggttaagcgtccacgctgcaaagaagccgccgaacaaggttatgccaactcaaccgagcttgccgactatctggtcgccaaaggcgtgcctttccgtgaagcgcaccacattgtgggtgaagccgtggttgaagccattcgtcagggcaaagcgcttgaagccttgccgctggccgatttgcaaaaattcagcagcattatcggtgatgacgtttacccgattctggcgctgcagtcctgcctggataagcgtaatgccaaaggcggcgtcgcgcctgagcaggttgcgctggcaatccgtgaagcaaaagcccgtctggcctgataaaagaccgacaaaaaaaagcgggccactcggcccgcaaattgttcatacactactttcttattgtgttgagactttccgtttcttttccgcccatttgactatcaggctgcgaagaactgctctagatcgtcgcttcccccgatgtggcgaccccgataaagacttgcggcaccgttgcacgaccgctgactgcacgcaggctaacggtggttgcgtccttacctaatacaacttcttcatactgaatgccgcgctcttgcagcatctgttttgctttggcacagaacgggcagcccggtttagtaaagaccgacacggattcctgcactttatattcaggcgccagatatttgagcatggtgtctgcatctgatacttcaaacgggtcgcccggcttgtttggctcaacgaacatcttttcgactacgccgttgcgtaccagcatggagtagcgccatgagcgcgggccaaagccgaggtcggctttctcgaccagcatgtccatccctttagtgaactcgccgttaccgtcaggaatgaaggtaatgttttctgcgttctgttctgccttccaggcattcatgacaaaggtatcgttcactgacacgcacagaatgctgtcaaccccatgttgtttgaacacgccggccaattcgttgtagcgcggcaggtggcttgacgagcaggtgggtgtaaacgcgccaggcagtgaaaacacgatcacagttttgtttttgaacagatcatcggtcgtggtatcaatccacttatcgccctgacgagtgtggaacgtgacttgtggtacgttttttccttcgcggcttgtaaacatccataacctcttaattaatattcaataaaaaatcattcttcggcgttgccgtttcgatgtgggacattattaacgattcagcttgatagatataatcgttgattgctatcttatctatcgctaatggctatcgccttggcgattcgtgaaagggagaaactatgaacatccgtgatttggaatatctggtcgcgctggccgaatttcggcattttcgccgcgccgccgattcttgccacgtcagtcaacccacgctgagtggccaaatccgcaagcttgaagatgagttgggcgtcatgctgctggaaagaaccagccgcaaggttttattcactcaggccgggttattgcttgtcgatcaagcacgtaccgtactgcgtgaggtgaaggtactgaaagagatggccagccagcagggcgaggcaatgtccggtccgctgcacatcgggcttatcccgacggttgggccttacctgctgccacaaattatcccgacgctgcataaaaccttcccgaaactggaaatgtatctgcacgaagctcagactcagcaactgttggcccagctcgacagcggcaagcttgactgtgccattctggcgctggtgaaagaaagcgaagccttcattgaggtgccattgtttgacgagccgatgaagctggcaatttatgacgatcacccgtgggcgtcacgcgacaaggtagcgatggccgacctgtctggcgaaaaattgctgatgcttgaggatggccattgtttacgtgaccaggcattaggtttctgtttccaggcgggggcagacgaagacacgcattttcgcgcaaccagtcttgagacgttgcgaaacatggttgccgcaggcagtggaattactttactgccgtcactggcggtgccgcaggagcgcagccgagacggcgtaacctatctgctttgcgacaagccggaaccgaagcgcaccattgctctggtgtatcgccccggttccccgttgcgcggtcgttatgaacagctggccgaagccatcaaaacgcacatgcaaacctacatggatgcactggcgttaaaaaagccggtttaagccgttcagtgccgcaacgcgataggcttccgccatcgtcggatagttgaaggtggtattaacgaaatactcgatggtatttcccgcccctttctgttccatgatagcctgaccgatgtgaatgatttcagccgcgcgttcaccaaagcagtggataccgagaatttgcttggtatctctgtgaaacagcagcttgaggctccccacgttcataccggctatctgcgcacgcgccaggtgtttgaactgggcgcggcccacctcgtaaggcactttcatcgcggtcaactcctgctcggttttacccacggagctaatctccggaatggtgtagatcccggtaggaatattttcgatgagatgcaccttggcttcgccctggatcatcgcctgtgcggcaatgcgtccctggtcataagcggcagacgccaagcttggataaccgaccacgtcacccactgcgtaaatatgcggcaaggcggtctggtacatgctattgacctttaacaggccacggctgtcggcttcgagaccaattttgtccagattcagcgagtcggtattacccgtacgtccgttggcaaacagcagggcatcggccttcacttttttgcctgatttcaggtgcacgataacgccgtcatcaacgccttcaattctttcaaattcttcattgtggcgaatcaccacgccgttgttccagaagtgatatgaaagagagtcggacatttcctgatcgaggaacgccagcagacggtcgcgggtattaatcaggtcaactttaacgtttagaccgcggaaaatggaggcgtactcacagccaattacgcccgcaccgtagataatcacgtggcgcggttcatgctcgaggccaaggatcaggtcgctgtcgtaaatgcgtggatgggtaaagtcgacgccagccgggcgataagggcgagaaccgcaggcaatcacgatatgctcggcgctcacaaagtcctgagttccgtcggcataggtgaccgaaatggtgttggcatcaataaaactcgcgtcaccggcaaagagtttgcactggttacgctcgtagaagccttcacgcatgcgagtctgttgattaataacggagtcggcatgacggagaatctgtggaaacgtcgagctcatggggcgagaaccgtcgctgtacagcggattctggttgaattcgatgattctgcttactgcatgacgtagcgcttttgatggaatagtgccccagtgtgtacaaccgccaccgacgttgttatagcgttcgataacggcaactctggcgccttgtttaaccagacccatggcagcaccttcaccgccagggccggagccaatgataatggcatcgaaatgatagttctgtgacatggattaggaacctatttttatacaaaatcacaacgtgaatgtaacatcatagacctattttcccaacgactggttatctattcgtgggaatgcagcaacattcagaagaactttatgctgaacttagtataacggtcgttgctgaaaaatttggtatagtgaaatgaattcaggcgaatgggtaagtagacactatcggatgaaggtcatgggcgtaagagcacaacaaaaagagcgtactcgccgctcgctgattgaggcggcctttagccaactgagcgctgagcgcagtttcgccagtttaagcctgcgtgaggtttctcgcgaagcgggcatcgcacccacgtctttttatcggcattttcgcgatgtagacgagctgggcctgacgatggtggatgaaagcggcctgatgctacgccagctcatgcgccaggcgcgccagcgtatcgccaaaggcggcagcgtgatccgtacctccgtctctacctttatggaatttatcggcaacaatcccaacgccttccgtttgctgttacgtgaacgttcgggaacctccgccgccttccgtgccgcagtcgcgcgtgaaattcagcatttcatcgcggaacttgccgactatttgcaactcgaaaaccatatgccgcgcagcttcactgaagcgcaggccgaggccatggttatcatcgtgtttaacgccggtgcagaggcgctagatgtcgacctcgcccagcgtcgtcagctcgaagagcggctggtactccagctgcgcatgatctccaaaggggcgtactactggtatcgccgccaacaggagagaacggctgacacatcagttaacgatgaggtcattcaaaacgattgaaattatggcaaggtagtaggctaatagatgcgagcagtcgaggctgctacggcttacgttgaaaaggataaaagaggattagaagatgacagaacaaccacgccaggataatggcaccctggtcttggctctgattgccggattatcgattaacggctcctttagtgccttattcagttccgttgtggctttttcaattttcccgattattgcgctggttctggccgtctactgtctgcacgttcgctaccagaaaagcgagatgccctttggtattcccaagctggccgccgcgtgttttgtgctgggactgctgctctatagcaccatcgttcgcgccgaatatccgcagctaggttcaaacttcctgccgtcgattatctgtgtggttctggtgttctggatcgcctaccgcctgaagaaacgtaaagcagtaaacaacgcgtaatctgtactaaatatagaaagggcagccctcgggctgcccttttacgttttacgcgtcgatgcgttcgagtaacacgccgcattccatgtgatgggtatatgggaattggtcaaacagcgccagacggcttacgcggtgagtctgttgcagcgtctcaaggttggcacacagcgtctcaggattgcaggagatataaaggatgcgggaatagccctgaaccagctttaccgtatcgtcgtccagaccgctgcgcggcggatcgacaaaaatggtttcacagtcatagcttttgagatcgacaccctccaaacgacggaactcgcgaacgccgttcatcgcctgggtaaaatcttcggcggccatgcggataatctgtacgttatcaatatgattggccgcgatattaaactgtgcggcggccaccgatggcttggcaatttcagtcgccagcacgcgattgaagttacgggccagcgccagagagaagttaccgttgccacagtagagctcgagcaaatcaccctttgcaccttcggtgacttccagcgcccattccagcatatgaatattcatcgcggcattaggctgggtgaagctgttctcaacctgacggtaaatcatatcgcggcctgcgaccggcagaacctcatcgacataatcctgatccagcataattttagttttcgccgcgcggccaatcagctgaatgtcgaagccgtcttggcgcagctggtcacgcaatgcggttgccgccgtctgccaggcgtcgtcgagcttgcggtgatacagcaatgaggcaatgattttgccgctgcgggtcgacagatagtcaatctggaacagcttgtgacgcagggctggctcggctttcaccgcctcgagcaggaccggcatcaggcggttgataagctcgcttgcggctgggaattgatcaacgcggatgcgagccttggtctgctggtcaaacatgatgtggtaaaggtcaccctcgtcatgccacacgcggaactcggcgcgcatacgataatggctgactggagaacggaaaacttcagccgccggcgcattaaatggcgacatcagcgccgtgagacgggcggtcttttccgccagttggtcgtcatattgttcaatgggcaggttttcaggcgtcatctattttctcgtcttgctgctaatcaatgggcgaactttgcggaatgtggtgcgttttgcccgctgattgtagggaatgccgtggtgatgtccagttttgtcgtatttagtttctctgagcgctgtggaagtctagatttccaaataggttgatcgtaggattcatctcaggcctccattgttgagttaaaagggaatccggtgggaatccggagctgtcgcgcagcggtatggggaaagcacggcgaacgcattattactctttatcatctaacaataatgcagacactgtcctttattaaggatgggaagttatcgcccggtgttatttctaataattctaatagaaacaacaaatcccaagcccgaagacctgcctgaattacgtcgcaattttcataatcttcgcgaaataggattatgttttactgcggcatcctttattgggttgggatgcgcgtttctatgacaattaaaaaacatgcgctgctgacggttctttccgtcacggcattctctggctgggcgcaagatagcacttcacaaacagacaataacgacacagtggtcgtcaccgctaatcgtttcccgcagccggtttcaacggtgcttgcggcaacgacggtagtgacaagagatcaaatagaccgatggcagtccaagtcgctgattgacgtaatgcggcgactgccgggcgtggatattgcgcaaaatggtgggctgggacagtccagctcgatgtttattcgcggaactaactcaagccacgtattaatcctgatcgacggcattcgtttaaatcaggccggaataaccggttcctcggatttaagccaaattccaatctctctggtacagaagattgaatatatccgtgggccctcttcggcggtttatggttcagacgctatcggcggagtggtaaacattattaccacccgcgataaactcggcacgaccctcagcgcgggaatcggttctaacggttaccagtcttacgatgccgcaacgcaacaaaagctgggcgatgataccgtcggcacctttgcagggaattacacttatacccgcggctatgatgtggtggctaatttgccggacaactacggtgacccgcgccagcccgatcgcgacggctttatgagcaaaacgctctacggttcattgctgcataactttaatgacaacctcagcggctttattcgcggctatggtttcgacaaccgcaccgcctatgacggcgattacagttataccgcgccttatgatgcgttgatcgatactcagcagctttatagtcaaacctgggataccggtctgcgttataaccaaggcatttatgccacgcagctgattggtagctattcccacaccaagacctacaactatgacccgcgctacgggatgtataatgcctcggcgacgctggatgatatcgagcaatacaacgtgcagtggggcaacaccgtgcaagcgtggcacggtacgattagcggcggtctcgactggcagaagcaaaccaccacgccgggcaccgattatctgagtgaaggctatgaacagcgtaataccggcgtctatgccaccacgcagcagcttttcgggccggtaacggtcgaaggtgcgctgcgtaacgacgataactcgcagtttggtcagcacactacctggcagagtagtgcagcctacgagtttatcgacggttaccgctttattgcctcctatggtactgcttataaggcgccgaatctggggcaggtttacagcgagaactatggcaatatcaatctgcgtcctgagcagagcaagcagtgggaaggtgcgttcgaggggctgaccggtccggtcacctggcgggtggggggtacaagaatgaaatcaccaacctgattgatagcgatccggtgacctaccgctattacaacatcggcgaagccaagattaaaggcgttgaggcgacggcatccttcgatacagggccgttgagtcatcagctgtcttatgactatgtcgatgcgcgagatgcacagactaacgagccgttgctgcgccgtgctaaacagcaggtgaaatacgagctggactggcagattgagcagattgattgggctgtcacctaccattatctcggtgagcgttatgacgaggactataatagtggcaataccgtcaagctgggaggtgtaagcctgtgggacgtcgccgcttcttatcctgttacgtcccatctgaccgttcgtgctagaattgccaacctctttaatcaagattatgagacggtttatggctacgcgacaccaggacgtgaatatttcctctctggaagctataccttctgataacgccatagtaccggctcgcccgacggcgctggtgtttgactctggcgtcggcgggttatcggtttatcatgaggtccggcagctcttgccggacctgcactatatatacgctttcgataatgtggcatttccctacggtgaaaagtcagaagcgtttatcgtcgagcgcgtggtcgaaatagtgagtgctgtcgccgagcgccatcctctttctattattatcatcgcctgcaataccgcgagcactgtttcacttcctgcgctgcgtgcaaagttcaactgtcctgtcgtgggcgtggtacctgccatcaaacctgccgccaaactgacgcgtaatggtatcgtcggacttctggcgacgcgtgctacggttcagcgtccttatactcatgacctgattgcccgttttgcggctgattgcaagattctgatgctgggttctgccgagctggtggagttggccgaagcaaagctgcacggtgaagaagtttctcttcctctattaaagaaaatcctgcaaccctggctgaaattgcgcgagccacccgacaccgtggtattgggatgtacccatttcccgctgctgagtaacgagttggcacaggttttacctgatggaacgcgaatgattgactcaggactggccattgcacgtcgtgcacactggttaattgagaccgcttttacttcaataccagcgaaaaaagacggaatcgaaatagaaagcatcgcctactgtatgaagcttgatgaaccggcttctgggttgctgcctgttttgcagtcatatggctttaaaagcatcctggaattgacgctttaaacgccttttgattaaacattcagcggtcggaaaagttttttaaaaataggggttgcggcctttcagaaactccctataatgcgcctccactgaccgggaacaacgactcctctaacgagaaccaagtcgccgggtcgggaagagaaaaagaaagattcgaaagaaaaactcttgactcttcagcgggaaagcgtaatatgcacctcccgcgccgcataagattcattgcgaacagcggcactgctctttaacaatttatcagacaatctgtgtgggcactcacaagacgatatcagccacctcggtggcaaaaaatatcaagtcttagagtgaccaagcagtaattcattatgaatgatgtgaagtaactttgagcatcgctgcacttgttgcagcaaatcgaacttttaattgaagagtttgatcatggctcagattgaacgctggcggcaggcctaacacatgcaagtcgagcggtagcacgggagagcttgctctctgggtgacgagcggcggacgggtgagtaatgtctgggaaactgcctgatggagggggataactactggaaacggtagctaataccgcatgatgtcgcaagaccaaagtgggggaccttcgggcctcacgccatcggatgtgcccagatgggattagctagtaggtggggtaatggctcacctaggcgacgatccctagctggtctgagaggatgaccagccacactggaactgagacacggtccagactcctacgggaggcagcagtggggaatattgcacaatgggcgcaagcctgatgcagccatgccgcgtgtgtgaagaaggccttagggttgtaaagcactttcagcgaggaggaaggcgttgtagttaatagctgcaacgattgacgttactcgcagaagaagcaccggctaactccgtgccagcagccgcggtaatacggagggtgcaagcgttaatcggaattactgggcgtaaagcgcacgcaggcggtttgttaagtcagatgtgaaatccccgagcttaacttgggaactgcatttgaaactggcaagctagagtcttgtagagggggtagaattccaggtgtagcggtgaaatgcgtagagatctggaggaataccggtggcgaaggcggcccctggacaaagactgacgctcaggtgcgaaagcgtggggagcaaacaggattagataccctggtagtccacgctgtaaacgatgtcgacttggaggttgtgcccttgaggcgtggcttccggagctaacgcgttaagtcgaccgcctggggagtacggccgcaaggttaaaactcaaatgaattgacggggcccgcacaagcggtggagcatgtggtttaattcgatgcaacgcgaagaaccttacctactcttgacatccagagaatttgctagagatagcttagtgccttcgggaactctgagacaggtgctgcatggctgtcgtcagctcgtgttgtgaaatgttgggttaagtcccgcaacgagcgcaacccttatcctttgttgccagcacgtaatggtgggaactcaaaggagactgccggtgataaaccggaggaaggtggggatgacgtcaagtcatcatggcccttacgagtagggctacacacgtgctacaatggcgtatacaaagagaagcgaactcgcgagagcaagcggacctcataaagtacgtcgtagtccggattggagtctgcaactcgactccatgaagtcggaatcgctagtaatcgtagatcagaatgctacggtgaatacgttcccgggccttgtacacaccgcccgtcacaccatgggagtgggttgcaaaagaagtaggtagcttaaccttcgggagggcgcttaccactttgtgattcatgactggggtgaagtcgtaacaaggtaaccgtaggggaacctgcggttggatcacctccttacctcaagatacgcattgtgcagtgtccacacagattgtctgatgaaaaagtaacgagcagaaatacctttataggcttgtagctcaggtggttagagcgcacccctgataagggtgaggtcggtggttcaagtccactcaggcctaccaaattctttctcatgctgcgttatgtacgcggtcgtttacccaagtaaacgtcccttgcacatgccttgcctgagaacgaattgaaactcttttcgagtgggacatataaaggtatctgttagtgactgtatggggctatagctcagctgggagagcgcctgccttgcacgcaggaggtcagcggttcgatcccgcttagctccaccatatccatacggttcacaccaatacttcagagtatattggcgacagtatactgcgaagtattttgctctttaacaatctggaacaagctgaaaaattgaaatgatacagctgaacataactctccgtagaagtactgagttatgcgcacctgtattagagtctctcaaataatcgcagcctcgaatgttgtcactctttatgagtttataagacaccttcgggttgtgaggttaagcgactaagcgtacacggtggatgcctaggcagtcagaggcgatgaagggcgtgctaatctgcgaaaagcgtcggtaaggtgatatgaaccgttatacccgacgatacccgaatggggaaacccaatgtgatacgtcacattatcgcatggtgaatacatagccatgcgaggcgaaccggggaactgaaacatctaagtaccccgaggaaaagaaatcaaccgagattccccagtagcggcgagcgaacggggaacagcccagaacctgaatcagtttgtgtgttagtggaagcgtctggaaggtcgcacggtacagggtgatagtcccgtacacaaaagcgcatgaattgtgagttcgatgagtagggcgggacacgtgacatcctgtctgaatatgggggaccatcctccaaggctaaatactcctgactgaccgatagtgaaccagtaccgtgagggaaaggcgaaaagaaccccggcgaggggagtgaaatagaacctgaaaccgtgtacgtacaagcagtgggagcctacttgttaggtgactgcgtaccttttgtataatgggtcagcgacttatattttgtagcaaggttaaccgtataggggagccgtagggaaaccgagtcttaactgggcgtcaagttgcaaggtatagacccgaaacccggtgatctagccatgggcaggttgaaggttgggtaacactaactggaggaccgaaccgactaatgttgaaaaattagcggatgacttgtggctggggtgaaaggccaatcaaaccgggagatagctggttctccccgaaagctatttaggtagcgcctcgtgaactcatcttcggggtagagcactgtttcgactagggggccatcccggcttaccaactcgatgcaaactccgaataccgaagaatgttatcacgggagacacacggcgggtgctaacgtccgtcgtgaagagggaaacaacccagaccgccagctaaggtcccaaagtcatggttaagtgggaaacgatgtgggaaggcatagacagccaggatgttggcttagaagcagccatcatttaaagaaagcgtaatagctcactggtcgagtcggcctgcgcggaagatgtaacggggctaaaccatgcaccgaagctgcggcagcgacgcttaggcgttgttgggtaggggagcgttctgtaagccgtagaaggtgaactgtgaggtttgctggaggtatcagaagtgcgaatgctgacataagtaacgataatgcgggtgaaaaacccgcacgccggaagaccaagggttcctgtccaacgttaatcggggcagggtgagtcgacccctaaggcgaggctgaaaagcgtagtcgatgggaaacaggttaatattcctgtacttggtgttactgcgaagggggacggagagggctaggctagccgggcgacggttgtcccggtttaagcgtgtaggggtgtagacctggtaaatccggtttactgtaaccctgaggcgtgatgacgagccactacggtggtgaagtagttgatgccgcacttccaggaaaagcctctaagcatcaggtaacattaaatcgtaccccaaaccgacacaggtggtcaggtagagaatactcaggcgcttgagagaactcgggtgaaggaactaggcaaaatggtgccgtaacttcgggagaaggcacgctgtcgctaggtggaggaacttgcttcccgagccgaagacagtcgaagataccagctggctgcaactgtttaataaaaacacagcactgtgcaaacacgaaagtggacgtatacggtgtgacgcctgcccggtgccggaaggttaattgatggggttatccgcaaggagaagctcttgatcgaagccccggtaaacggcggccgtaactataacggtcctaaggtagcgaaattccttgtcgggtaagttccgacctgcacgaatggcgtaatgatggccaggctgtctccacccgagactcagtgaaattgaactcgctgtgaagatgcagtgtacccgcggcaagacggaaagaccccgtgaacctttactatagcttgacactgaacattgagccttgatgtgtaggataggtgggaggctttgaagcgtggacgccagtctgcgtggagccaaccttgaaataccaccctttaatgtttgatgttctaactcggccccgtaatccggggtgaggacagtgtctggtgggtagtttgactggggcggtctcctcctaaagagtaacggaggagcacgaaggttagctaatcacggtcggacatcgtgaggttagtgcaatggcataagctagcttgactgcgagagtgacggctcgagcaggtacgaaagtaggtcatagtgatccggtggttctgaatggaagggccatcgctcaacggataaaaggtactccggggataacaggctgataccgcccaagagttcatatcgacggcggtgtttggcacctcgatgtcggctcatcacatcctggggctgaagtaggtcccaagggtacggctgttcgccgtttaaagtggtacgcgagctgggtttagaacgtcgtgagacagttcggtccctatctgccgtgggcgttggaagattgagaggggctgctcctagtacgagaggaccggagtggacgcatcactggtgttcgggttgtcatgccaatggcattgcccggtagctaaatgcggaaaagataagcgctgaaagcatctaagcgcgaaacttgcctcaagatgagtcttccctggagcttcgagctccctgaagggacgtttaagactaagacgttgataggctgggtgtgtaagtgcagcgatgcattgagctaaccagtactaatgacccgagaggcttaaccttacaacaccgaaggtgttttagagagacgagacgaaagtttcaagaaatcagcttgttcaaagattggttctgatggcggcctgcaggaatgtggaaagcggttgggatgaaacagaatttgcctggcggcagtagcgcggtggtcccacctgaccccatgccgaactcagaagtgaaacgccgtagcgccgatggtagtgtggggtctccccatgcgagagtagggaactgccaggcatcaaattcgttcctttttcccctgacaaggaaaaatacaaggaacaaactgataacagaccgattgtctgttgtgagtgaaagaaccggtggagcggtagttcagttggttagaatacctgcctgtcacgcagggggtcgcgggttcgagccccgtccgttccgccactaatttaaattatgcctgctaaaatttagcaggcataatagtaagcagatttaggggcgtagctcagttggtagagcaccggtctccaaaaccgggtgtcgcgagttcgagtctctccgcccctgccatataagaacccttcgcgaaagcgaggggtttttttcgttttgaatcctctaaacacagctcgaaaacctataaaaagtcctctttctgctcaaatacctctcgtttattgcctaaaaaattccctgatttttctttattttccatataacgctcactctggcctcatatttccccgccatttctccttttttactccccaattgttgtgatcttttagctgaatacatgcacgaattgattgttaatcatctatgtgaccgcgctcaacccccattcctgcaatggtctaaaactaagtgtcatcgggtagagctctgctcaccgataaaactcggttttggcgtatctctatctatgctgcaccctacaagacgcaacaaaaagtagctcagactacacgcgaggaaataacaatgtataaacgtttattgctggcagccgcggtcgcaacggcattctgtggagccgttcaggcggcacctttggtcgtgggtttttctcagataggctctgaatcgggctggcgttctgcggaaacaaaagtctctaaactcgaagcgcaaaaacgcgggatcactctgaaaattgcggatgcccaacagaaacaagagaaccaaatcaaggcgatacgttcgtttatcgcgcagggtgttgacgccatctttatcgcccccgtggtcgctaccggctggacgccagtgctgacagaggcaaaagaggcgaagatcccggtgttcctgcttgaccgcactatcgaggtaagcgatccctctctctacaccgcagcggtagcctctgacagcgttcacgagggcaaagtcgcgggagattggctggttaaggaggttgctggcaaaccgtgtaatgtcgttgagctacagggcacggtggggctagcgtggcgctcaatcgtaaaaaaggttttgccgatgccatagcgtcagcgccaaatgtgaaaattatccgctcgcagtctggagactttacgcgtagtcagggtaagcaggtgatggagagttttatcaaggctgagcaaaacggcaaaaacatctgcgccgtgtatgcacataacgatgacatggcaattggagccatccaggcaatcaaagaggctggcctgaagccgggatcgcagatcaaggtcgtctcaatcgacggcgtaccggatatctataaggccatgcttaacggggaatctaacgcttcggtcgaactgacgccaaacatggcaggcccggcgttcgatgcgctgattaagatgaaaaaagacggtactcagcctccgaagtttattcagacccagtccacgctcgtgctgccagacatggcccagaaagagtatgacatgaaaaaagacatgggctactaagcctatgtaccggctctgacttagcacggagccggttttatcatcccattttgcccatccagccgttatcgtgcgcatgcagtcggggtagagagtctcatggataatcttcagtcaacaaccttactcgacgttcgcggtttatccgttgagttccccggcgtgaaggcgctggaaaaagtcgatttcacgctcaattgcggcgaaattgttgcattattaggagaaaacggcgcaggaaaatcaacgcttatcaaggcgttgaccggtgtttataaacgctcagcgggtaccgtgctgctaaacggtgagccgattgaagccaccaataccgcgcatgctcaagcgctgggcattggcaccgtctatcaggaagtgaacctgctgccgaatatctcggtggccgccaatctgttcattggccgagaacctacccgttttgggctggtaaatcagcgccagatggataaacaggcccaggtactgcttaccggctatggccttaatctcgacgttagccagccacttgcaaactattccattgccattcagcagattgtcgccattgcacgggcggtcgatctttctgcccaggtcctaatccttgatgagcccaccgccagccttgatgccaaagaggtcaacatgctgctcgatattctgatgcagctgcgcgacaaaggtatgggtatggtgtttgtcactcacttcctcgaccaggtttatcgcatcagcgatcgcattaccgtattacgtaacggcaagctggttggaacctcggaaacgcgtaatctgccgcgcatcgagctggtgcccatgatgctggggcacagctttgacgaagcgctgctcaagcgcggcgaacatcgtgccgtgaccggcgatcctctggttgattttaaaaattatggccgacgtggattggtcgagaattttgacctcaacgtcaaacgcggtgagatagtcggtcttgccgggcttctgggttcagggcgtaccgagacggcgcagcttatcttcggcatcaagagtcacgacaccggcactgcgacggtgagcggaaagcccgtgacgattcgtactccgcgcaaggcggcgaaactgggatttggctattgccctgaagatcgcaaaacggacggcattatcggcgcggccacggtacgcgaaaatatcattctggctttgcaggcacagcgcggctggcttcgtccgttgtcaatgaaggaacagaaccagattgccgagaagtttatcaagctgctgggcatccgtacgccgagcgccgaacaggaaatccaatacctgtccggtggaaatcagcaaaaggtcctgctttcacgctggttagcgacgcagccgcgtttcctgatcctggatgagccgacacgcggtattgatgtcggtgcacacgccgaaattattcgtctgattgagcagctgtgtgacgaagggctggcgctgctggtcatctcttcggaacttgaagagctggcgggttatgccgacaggatagtggtgctgcgtgacagacgccatattacgcaaatcgagcaggatcagatttcggttccagccattatgaccgcgatcgcggtccaataaggggatttccatgacgaacaggagtctgccgatgacgggaaggccgcgcaaggtccgctgggtatttcccaaggggtcaatacaggtcggggcatttctggctatcctggtgattgatagcctcgtcgcacccggttttttcaacattcacctacaggatggtcgactgtttggcagcctggtcgatatttttaaccgtggcgcaccggtcgccattcttgcactcggtatgacgctggtcatcgcgaccggtggcattgacctgtctgttggggcggtgatggcgattgccggggcaacggccgctaccatgacggtacaaggatatccgttgctggttgttttgctggctgccgtcgcggtgggcgccgcctgtggactgtggaacggcttcctggtggcggttttacagatacagccgatcgtggcaacgctaatgcttatggttgccggtcgcggaattgcccagcttatcactgaggggcagatagtcacctttgagaataacggcctgtcgcagttcgggagtggatcgctgtttacgctgccaatgccggtgatcattgctgctgtgatgttgattttgctgtggttattaacgcgtaaaaccgcactcgggctgtttatcgagtcggtgggtatcaacctccgctcttcttataatgcgggcgtcaatgcgcgtctggtgctgattgcggtctatgtcatttgtgggatatgcgctgcggtcgcgggagtgattgtgacggcagatattcgcggggccgatgctaataacgctggcctgtggctggagctggacgccattttggccgtggttatcggtggcggttcgctgctcggcgggcgttttaatctgctgctctcgctggttggcgcgctgatcattcagggaatgaatactggcatcctcctctccgggtttaaacctgagttcaatctggtacttaaggcgatcgtggtgttagccgtgctggtcgtgcagtcccctcgcgtatctctcagcagtgtgtttaggaggaaggaataatgctcaagcgtaatctcccgctgttgataaccgttctggtttttattgcagggtacgcatactgttttacccagttccccggcttcgcgtctacccgcgtgatttgcgatctgctgacggataatgcgtttctcggtattgttgcggtgggtatgaccttcgtgattctgtccggcggtatcgatctctcggtaggctcagttatcgcctttaccggcgtcgcgctggcaaagctgattggtgagtacggggtgccgccttatctggcctttgctatcgtgttggtcatgggggcgttctttggtgcactgatgggctggataatcgacaccctaaaactcccggcgtttattattacgctggcgggcatgttcttcgtgcgcggtatgagctttatcctgtcagaggagtcgttgccgattaatcacccgctttacgccacccttgctaactatgcctggaaagtcccaggaggcgggcggtttaccctgctggcactggtgatgctctgcgtggtggccgtcgggattatcctcgcgcacagaacacgctttggtaataacgtctatgcgataggcggcaacatccactcggccggcctgatgggcgtccctgtcagaaagaccatcattgctatctacacgctctcgagcacgctggccgtcctgtcggggattattttctcgctctatacctcggcgggctatgcgctggccgcgagcggcgtggaactggacgccattgccgccgtggtgattggcggaacgcttttgagtgggggcgtaggcaccgtgctgggtagcctgttcggggtgatgattcagggtctgattcagacctatatcaccttcgacgggacgctaagctcgtggtggaccaaaatcgttatggggattttgctgtttatcttcatcgcgctgcaaaaaggaatgggctcttattggaccacacggcgagcccgccatccgcagcttaaaacgacgtgatcgtcgccgaaaatgccttaatattgagtatccatcggtattttaagcagttgtctgatgagcacctgctggtcgctgttttgcagccatacggcatacagcggccttattaccggcggtacgtcgggataaaccgtcaactgtggatagtctttctcccagtggcctgggaggaaggcgcatccgccggtggtctccagcagctgacgcgttagatgcgccgaggtggtcgttaacaccggttcctgctcgtttgcctgcattctgctttcttgctgtggaaagtctgcgccccattccagcctgatgtacgcccctgcgcagttttatcgtgtttattggcgcaaaaaagacgtaacgaaaaattacccagcagctggctagacagttcgtccatctttgggggttcggtggtaatgagtaaatcgagctgtctttcatgcagctgttttaccagcgactggcgcagtgcgacccttgcctcgaggcgcaatgattcacgctgctgatataacgcctgtagccacggtgttaaataggactcccaaagcgacgctgtcgccccaattgacagttcagtgtgctgtaaagagcgcacaacctctttttttgccaattgccacgtcgacatcaggttttctgcgtagggcagcagacgctctcctgcgggcgttaaacgtatgttgtttctgtggcgagtgaataaatttgccccgagctgagtctctaactggcgtatgcgaaagctcaccgccgactgggtcaaatacagagattcagccgcccgaccaaagtgacgagttctactgacctccaaaaaggttttcagtaattccgtgtccactaccatctccaaaattttttgtcgttaagatttaaatgttttgttttacagattgtcaagcctatctaatactccgcgccataacagcacgaccatgaatgaattaggagcgtgtcagatggcggaaagcttcaccacgacaaatcgtttttttgacaataaacattaccctcgcgggttctcccggcatggcgatttcaccattaaagaagcgcaattgctagaacgttacggctatgctttcaacgagctggacctgggaaaacgcgaaccggtaaccgaagaagaaaagctgtttctggatgtttgccgcggtacccgcgagccagcaactgacgctgagaaagtgtggaataaatatattattcgcacccgtcgcccgaagaaattccatacgttgtcaggcggaaaaccgcaggctgatgcggtggaagattacaccgacagcgacgattaacaaaacggggcttgtccccgtttttttatgccagatttttatgcaatgttaacaatagtcgatccatacaacgatagcttaatgcttcagaaatatgtgctttttcgatagtcgactggtgattaagatctgccagagtccttgccactttcagaatgcgatgccacgccctgaccgacagtcccagcttttgtaacacactttccaaaaactccgcatcttcacggctcaatttacaaaattgctgaacttcacggctgcttaagtgggcattgagtttgcctgctcgacttaactgaatttcacgcgcggcaatcactctccctctgacctgttcgctgctctcctctgcgatgtgcgttacctgttgatgctggcgactcagcagcccgggtggcagcattggcacctccagcgagagatcgaaacggtcaagaaaggggccggataaccgactgagataacgcaatatctgctgcggcggtgtgcgattatgctgaccctgatagtgtcccgtcgggctaggattcatcgcggcgataagctgcatcctcgccggaaagtcgaccttggcccgagtgcgggaaatggtgatttctcccgactccatcggctgtcgcagggcatcaagcaccttgcgctcgaattccggcagttcgtcaagaaatagcacgccgttgtgcgccagcgagatctcccccggtcgcggaatagagccgccgccgaccagcgcattgagcgaaatgctgtggtgcggtgcgcgaaaagggcgctgtcgcagataggccaactgtggccccggttgcccctcgttttgcttgtcgggcgaatagaccagactggctattgccgcagtttcaagcgcctcttgctgagtcagcggcggcagaatacccggcagacggctcgccaacatggttttgccggtaccgggtggcccgagcagcagcaggttgtgcccgcctgcggcggcaatttccagggcgcgttttgactgctcctgaccgatgatatcgctcaagtcaccgcttggaggttctggcagcagctccgcggctctttcgacctcctgaagctccccttcgccctgtagaaaggcacaaacctgcagtaggtggtcggcgacccacacggtattttgcgccagcagcgtcatctcacgttggttatccacgggtaaaatcagccgtcttccctcacgttgggccgcgatagccgacggaatagcgccattaacgccacgtaacgcaccagaaagccctaactcgccaataaactcatattctcccagcctgtcggtaatgagttgctcagaggccgcgagaatcgctaatgcgataggaaggtcatagcggccgccctccttgggtaaatctgccggtgcaagattcaccgtgatacgtttgggcggaaaggtgaacccgcagttgatgagcgcactgcgcacccgatctcgggcctctttgaccgtggtttcgggcagtccgaccagcgttagcgcgggcaatccgttgctaatatgaacctcgatcgagacgcgaggggcaaccacgcccagcgaggcgcgagtattgactaccgagagcgacatgcggcctccctgtgaacttcaaaaagccattatcgtgagcctgatgttttatggtatcggcaaccccttgtttaccatcatctgccgcaatctttttctgcaaccaacgtcacacgacatcttgcctgggaagcgtctccaaacgtgtagaaacactcattaacactcggtcttttttggatacacattagctggctaatgatcttgctggtaatttggccgccgtgtattaattaaacatgtgtatttaacaataaataaacaaatacatcttctctgtagcagcttccccctacctattcgaataaggtaaatcacatgtttggttggacttcccgacaacgcaatgtcgccatcgccagctttcttagctggacactcgacgcctttgacttcttcctactggtcttcttattaagcgatatcgcaacctcatatcacgttgatataaaagacgttactttagctattttgttaacgctggcggtgaggccgatcggcgcattgctgtttggtcgcgcagcggagaagtttggccgcaaaccggtcctgatggttaacatcctgtttttctcattcttcgagctgtgcactgcggcggccccttcactgaccgttttcctgatcctcagggtgatttacggcgtggcgatgggcggagtctggggtgttgcatcgtcactggcgatggaaaccattcctgaccgttcgcgcggtctaatgtcaggtatttttcaggccggttatccgttcggttacctgctggcaggcgtggtctatggcttgctttacagcgtagtcggctggcgcggtatgttcgtcatcggcgcggtgccggtgctgctgctgccgtttatttacttcaaagttcaggagtcgccggtctggttggcggcgcgcgagcgtcatgaaagcacggcgttattgccggtgttaaagtcccactggaaactctgcgtttacctggtggtgctgatggcggcgtttaacttcttcagccacggcactcaggatctctatccgaccttcctcaaggtccagcatggctttgatgcgcacacggtgagtattattgctatctgctacaacatcgcgtcgattatcggtggggtgactttcggtacgctgtccgagcgtattggccgtaaaaaagccattatcatcgcggcgctgctgtcgcttccggtgttgccgctgtgggccttcgcgggcggctcctggactctgggcatcggcgcattcctgatgcagtttatggtgcagggtgcctggggcgttatcccgacctacttgaccgagctggtgccggccaatacgcgcgccgtgctgccaggttttgtttaccaattgggtaatctgattgcctcggtcaacgctacgcttcaggcttacatcgcagaaagtcatggtcacaattacggattagcgatggcgatggtcgccggaaccgtggcaatagttatttcggtactagtgttcttcgggcgcgatactcagggcaaggttataaatgcagcatcaaatgctaaagcctcagatgtcggctccagagcctgataaccctgagttttttgtgattttttgtacagaaacctgagatggtaacgaaagaaaattgttgtcattgaacttataactgtgataactctgtaggcaatcgttcgtaagaagaatttaagaacccaaaaaatgaaagctctcgtcctcgtgctaagcctagtcgtaattcgtgtggtggtgattattatcccaccgtgcggggctgcacttggacgaagaaaggcttactaaacaagcctgaagctgaaaagaacccccgcaccgaaaggtccggggtttttttttagccaggtaaaaatgtagcggaatgaggcaggggaaaatatgaacaacagcataatattctgcgctaataacaaaaaggcaggggaataagatgaatggagcacagtgggtagtacaagcgttgcgttcgcaaggggtggatatggtctttggctatcctggcggagcaattatgccagtatacgatgcactctacgatggcggcgtggaacacctactgtgtcgtcatgagcaaggcgcggcaatggccgctatcgggtatgcccgttctaccggcaaggttggcgtatgtattgccacctccggtccgggtgcaactaacctgataaccggcctggccgatgcgctcatggactctgttcctgttgtcgccatcaccggtcaggtaggctctgcgatgataggtaccgatgcattccaggaaatcgacgtattgggcctgtctctggcctgcaccaagcacagctttctggttgaatccctcgaggcgctgccggaaatcatggccgaagccttcgctatcgccaacagcggtcgtccgggcccggttctgatcgacatcccgaaagacattcagctcgcggtcggtgatttgaccccgcacctgatgcccgtcgagcaagagatgccgcatccaaccaccgaactgcagcaggcttacgacatgattgccaaggcgcagaaaccgatgctttacgtcggcggtggtgtagggatggccggcgcggttactgctctgcgctcatttattcgtgccacgggaattccgtgtgttgctacacttaagggattgggcgcacctgatgccaacgacccgtgttatctgggtatgttgggcatgcatggcaccaaagctgccaatatggcggttcagtcctgcgacctgctgatcgccgtcggtgcacgtttcgacgaccgcgtgaccggcaagctgaacaccttcgcgccaaacgccagcgttatccacatggatatcgacccggccgaattaaacaaactgcgccaggcgcacgttgcactacagggttccctgcagaccctgctgcctgcgctggaacagccattatcaatcaacgcatggcgtgatgaagtcatgacgtcgaaagcggccggcgagtggcgttatgaccatccgggtgaagccatttatgccccgctgttactcaaacaaatttccgatcgcatggatgccaataccgtggtgacgactgacgtgggccagcatcaaatgtggaccgcgcagcatatgaccttctcacgtcccgagaacttcatcacctcgagcggtcttggaacaatgggcttcggcattcctgccgcagtcggtgcacaggtggctcgccccgacgatatggttatctgcgtttctggtgacggttccttcatgatgaacgtacaggagctgggtaccatcaagcgaaaacagttgccgctgaaaatcctgctgctggataaccagcgattagggatggttcgacagtggcaggaactgttttttgatggacgcttcagtgaaaccaacctctcagataaccccgattttattacgctggccagcgcattcgatatcccgggccaacgtatcagccgtaaagaccaagtcgacgcagccttggacgctttctttaatagcaaaggcccgtacctgcttcaggtatccatcgacgaaaatcagaatgtctggccactggtaccgccgggtgcaggcaacgaaaccatgttggagaaaatgtcatgatgcagcacaacgtctcgattcaggctcgtttccgtccagaagtcctggagcgcgtactgcgcgtcgttcgtcaccgtggattccaggtctgcgccatgaacatgagcacgatggtcaacgaagagaatattaatatcgaattgaccgttgccagcctgcggtccgtagatttactgtcagtacagttaagcaagcttatggacgtcgccagcgtcgaagtccaacaacacacatcacaacaaactaaccaacaaatgcgcgccaacgcgtaagtaaggaattgagaaatgtctacgaagaaagctgattttatttggttcaatggcgagatggttccatgggaagacgccaaggttagcgtcatgtcccacgcactgcactacggcacctccgtatttgaaggcgtccgttgctacgactcgcacaaaggaccagtggttttccgtcatcgtgaacatatgcaacgtctgcacgactctgcaaaaatctatcgtttcccggtaaaacagtccgttgaagaactgatggaagcctgtcgcgcggtactgcgtaaaaacaacctgaaaagcgcctacatccgtcctctggtcttcgtcggtgacgtgggtctgggcgttaacccgccggacggttatgaaactgacgttatcattgcggcgttcccatggggcgcgtacctcggtgcagaagcgcttgaaaacggtatcgatgcaatggtttcttcatggaaccgcgtagcggccaacaccattccaaccgcagcaaaagcgggcggtaactacctgtcctccctgctggtgggcagcgaagcgcgccgccacggttatcaggaaggtatcgcactggacgtgaacggctacgtttctgaaggcgcgggcgagaacctgttcgaagtgaaagacggtattcttttcactccgccattcacctcgtctgcactgccgggcatcacccgtgacgctatcatcaagctggcgaaggatctgggcatcgaagtgcgcgagcaggttctgtctcgtgaatctctgtacctggccgacgaagtgttcatgtctggcaccgcggctgaaatcaccccggttcgcagcgtagacggcatccaggtgggtgcgggcaaacgtggtccgattaccgagaaaatccagagcgcgttctttggtctgttcaccggtgaaaccgaagacaaatacggttggttggatccagtaaaccctgcataagactaaaaatatattccgtgggcggcggtttcgccgcccacataaaagtattaattggagtgaatagagcatgccaaagtaccgttccgctaccacgactcaaggccgcaacatggccggcgcccgcgcattatggcgcgccaccgggatgaccgatgacgatttcaataaaccgattattgccgtcgtaaactcctttacccagtttgtcccgggccacgttcacctgcgtgacatggggaaactggtcgcagaacaaatcgaagcctccggcggtgtggcgaaagagttcaacaccatcgccgtagatgacgggatcgccatgggtcatggcggcatgctgtattcattgccttctcgcgaactgattgccgactcggtggagtacatggtgaacgcgcactgcgccgatgccatggtctgtatctccaactgcgacaaaatcactccgggaatgctgatggccgctctgcgccttaacattccggtgatcttcgtttcaggtggcccgatggaagccggtaaaaccaagctgtcagacaaaatcatcaagctcgatctggtcgatgcgatgattcagggcgcgaaccctaacgtcagtgacgccgacagcgcgcagattgaacgttctgcctgtccgacctgcggttcctgctccgggatgtttaccgccaactcgatgaactgcctaaccgaagttctgggcctgtcccagccggccaacggctcactgctggcgactcacgccgaccgtaaagagctgttcctgtctgccggtaagcgcatcgttagcctggctaaacgttactacgaaaaagacgacgcaagtgtgctgccgcgcagcattgccactaaggctgcattcgaaaacgccatgacgcttgatatcgccatgggcggctcgaccaacactattttgcacctgctggccgccgcgcaggaaggcgaagtcgatttcaacatgaccgacattgacgcgctgtcccgcaaggttccacacctgtgtaaagtcgcgccaagcacgcagaaatatcacatggaagacgttcaccgcgccggtggcgtgtggggcatcttgggcgagctggatagagctggcctgatgaaccgcgacgtctataacgtgctggaaatgaaattcccggaaacgctacagcagtacgacatcatgctgacccaagacgaagccgtgaagaaaatgttccgcgctggcccggccggtattcgtaccaccaaagcgttctcacaggattgccgctgggacacgctggataacgaccgcgccgacggctgtatccgttctatcgaccatgcgtttagcaaagaaggcggtctggccgtgctttacggcaacatggctatcgacggtagtatcgtgaaaaccgcaggcgttgacgaagaaaacctgaccttccgtggcccggccaaagtctacgaaagccaggacgccgcggttgaggctatcctcggcggtaaagtcgttgccggcgatgtggttgttatccgttatgaaggacctaaaggcggcccaggcatgcaggaaatgctatatccgaccacctatctcaaatcgatggggctgggcaaagcctgtgcgcttatcaccgacggccgtttctcaggcggtacctcgggtctgtccatcggccacgtttctcctgaagcgggcagtggcggtctgattgccctggtccaggacggcgacatgattgatatcgacatccctaaccgcagtatggttctggatgtggcagacagcgagttggctgcgcgtcgtgaaatcgagctggcccgcggcgacaaagcctggacgccgaaagaccgcgtgcgtgaagtttccttcgccctgcgtgcctatgcgctgctggcgaccagcgccgacaaaggtgcaattcgcgacaagagtaagctgggaggctaactgcatggcggtatcacaacctctgcccgatcaaccctgcggagcagaatatctgcgcgcagtgttgcgagcacccgtttatgaggtggcgcaggtcaccccgttacaggtcatggaaaaaatctcgacccgtctggaaaacaccattctggtcaaaagagaagaccgtcaggcggtgcacagttttaaactgcgcggcgcttattcaatgattgccgggttgacggaagagcaggctgcgcgcggtgtgattacggcttcggccggtaaccacgcgcagggcgttgccttgtcggctacccgcaaggggatcaaggcgctgattgtgatgccggttgcgaccgccgatatcaaagtggatgcggtgcgtaattttggcggcgaggtgctgctgcacggcgccaactttgacgaagccaaagctaaggcgcttgagctgtcacaggctcagggcatgacctttgtgccaccgttcgaccatccggcggttatcgccggacagggcacgttggcgatggaactgctgcaacaggatgcacaccttgaccgggtctttgtcccggttggcggcggcggtttggcggcgggcgtagcggtattgattaagcagctgatgccgcaaatcaaggtcatcggcgtcgaagccgaagactctgcctgcctgcgtgccgcgctggacgccggtgagccggttgatttggcgcgcgtcgggctgtttgccgagggcgtggccgtgaagcgtatcggcaacgaaaccttccgcctgtgccgtgaatacctcgacgacgtgataaccgttgacagcgatgccatctgcgccgcagtgaaagatctgtttgaagacgtccgtgccatcgccgagccttcgggcgcactggcgttggccggtctgaagaagtacgtgcaggagcataatattcagggagaacgtctggctcacgtgttgtcgggggctaacgttaacttccacggcttgcgctatgtgtctgaacgctgtgagctgggagaacagcgtgaggccttgctggcggtgaccattcctgagcgtaagggcagtttcctgaacttctgccagctgctcggcggtcgttcggtgaccgagttcaattatcgctacgcggatgccgacaatgcctgcatcttcgtcggcgtgcgtttgacgcgcggtcatgcggagcgtaaggaaatcatcgatctgctgaacgacggcggtatcaggtggtggacttgtccgacgacgagatggccaagctgcacgtgcgttatatggtcggcggtcgcccgagcaagccgctgcgcgagcgtctttacagcttcgagtttccggagtcgccgggcgcgttgctgaaattcctgcacacgctggggacgcactggaatatctcgctgttccactatcgcagccacggcaccgattttggtcgcgtgctggcagcgttcgagttgacggatcaggagccggagttcgagaagaacctctcagcgctcggttatgactgtcataacgaatcggataatcctgccttcaggttcttcctgcagggatagcgagcaataaaaattaaaacagggacggcgtatgagtactgcgtttaatggcttcagtcagcaagggttgaatttccttcagcaggtgcggattgaaaacgacaaagagtggtttgaggcaaatcgacaggtgtacgaccaagaactgctcacgccgtttcgggcgttggtcgaggcactgagtgcgaccatgctggccattgatccgcagttcgagactcgtcccgccatcggtaaaacgctgtcgcgtattcatcgcgacacgcgtttctcacacgacaaaagccgttatcgcagccgtatgtggctgacgttcaagcgtccaagcaaagactggaaggacgcaccggtttatttcttcgagctgggaccggacttgctgcgctatggactgggttactacagcgccaacaagcagaccatggacctgttccgccataccttacatcgccagcctgagcttttccttgaggtagccgaatgttgccgtgcgccgttcgaactggtgggggaaagttataaacgcccgctggtgaaagaacaaaaccccgagattgccacctggtacaaccgtaaatcattcgcagtaatggcgacggaccttcacgtcgaaaagctttttagcccgacgctggtggacgagcttgccaaaggttttcaacggcttgaaccgctttatcactggttaatgcgcgtagaaaccctgaaacaggtcgatcccgccgatctttaagcgcaaaaacgatccgcactacagcttcagttcaacctgcaacagcgactgccagaatgcctcgatcaacggttcattgaggcgtttacgctgcacgcacacgcctaacggcagcggtgcaccgatggtcacgttgtcatgcaccgcaattcgattgcggatcaggtctgggctgttttccagcacgaccacggggattagcgctacgccgcagcccaatgccaccatggacacaatcgcttcatgaccggaaaccgtggcgtaaatcagtgggttattcaatttatgctgacgaaaccagctgtcgatgcgtttacgtgccggtccatgctcgggatgataaacggaatttgtgaccattccggtgaagtctgcgtgacctgcgttctcaccgcacagggcagcgaaggaacaatcagcgccatcgtgacctcaccaatcggcgtaaagtctatacttgaaggcagtgtttcaggatgcccggctatgccgaggtcggcttcggtagactgtactttttcgaccgcatcggcggcatcgccggtggtcagtttgatttcaaccagcggatgctgggcgcggaagcggtcgagtatcggcggcagatggctataggcggcggtcaccgagcagaataaccgcagttcgccggagagcgtcgggccatgttgccccatcgcatgacgcagctgctggtactgcaacagcgtttgctgggcgaagatttttaactgttcgcctgcctgcgtgagctgcaccgtgcggttatcacgctgaaacagcgcctgcccaagctcttcctccagccgctgaatttgtcgagagagggtcgacgggctgacgtgcgtcgccttggcggaacgcccgaaatgccggctttctgccagatttaaaaatagtttcagatcgcgtaagtccataagtttttcccgactatgtcatgcgtttgctgtggattattttacgttgcataaaatgcaatatcatcttcgtaatatatcaatttaagcaatgcaacgcatgacatatagtgatttcacagcaacccgtcatgcttcaagctgcagatgcattggctatgctcgttcaccccagtcacttacctgagtaagtccacggggactcacgaacttgccgccttcctgcgactcgaatcattcagggctcaacaattttgtactaacaaccccaatcgcaacggagttttaccatggctaactatttcaacacattgaacctgcgtcagcagttggcgcaattaggcaagtgccgctttatggctcgcgatgaattcgccgatgaagccagcttcctaaagggtaaaaaagtggtgatcgttggttgtggcgcacagggcctgaaccaaggtctgaacatgcgtgactccggtctggacgtttcctacaccctgcgtgcagaagcgatcgccgagaagcgtgcttcatggcgtaaagcgaccgaaaacggcttcaaagtcggtacctacgaagagctgatccctcaggcggatctggttgttaacctgacgccagacaaacagcacagcgcggtggttaaagcggttcagcctctgatgaaagacggtgcggcactgggttactcacacggcttcaacatcgttgaagttggcgagcaaatccgtaaagacatcaccgtagtgatggtggctccgaaatgccctggtacagaagttcgtgaagaatacaaacgcggtttcggcgtacctacgctgattgctgttcacccggaaaacgacccgaaaggcgaaggcatggcgattgctaaagcttgggctgcggcgaccggtggtcaccgcgcgggcgtactggaatcttcattcgttgcggaagtgaaatctgacctgatgggcgagcagactatactgtgcggtatgctgcaggcgggttctctgctgtgcttcgacaaactggttgctgacggtgttgacgcggcttacgcagaaaaactgttgcagttcggctgggaaaccatcaccgaagccctgaagcagggtggcatcaccctcatgatggatcgtctgtctaacccggctaaactgcgtgccttcgcactgtcagagcagctgaaagaaatcatggctccgctgttccagaaacacatggatgacatcatctctggtgagttctctggcggtatgatggctgactgggcggcagacgacgttaaactgctgacctggcgtgaagagaccggcgcaaccgcattcgaaaacgcaccacagttcgaaggcaaaatttctgagcaagagtacttcgaccacggcgttctgatgattgccatggtgaaagcaggcgttgagctggcgttcgaaaccatggtggcctctggcatcatcgaagaatccgcttactacgaatcactgcacgagctgccgctgattgcgaacaccatcgcacgtaagcgtctgtacgaaatgaacgtggttatctctgacaccgcagaatacggtaactacctgtttgctaacgcggcagtaccgctgctgaaagagttcatgactaccctgcaagcgggcgacctgggtaaacctgttgccgcgaccgaggttgacaatgctcagctgcgcgacgtgaatgaagctatccgtgcccacgctatcgaagcggttggccacaagctgcgcggctacatgaccgacatgaaacgtatcgcagtagcaagctaataccggtttacgcgttacggctgtacccgataataaaaagtaaaaaagcaccgccttggcggtgctttttcttttactgcgttctgtggagcaaacttagttgcggtacagaaccttgatcaggtggtaaccgaactgggtcttaaccgggccaagaggtttcagcagttcaccgctgaagaccactttatcgaaagctggcaccatgtcacccttgcggaattcacccagtgaaccgccgtcgcgcttggacgggcagtttgagtgcttgcgtgccagttcctggaaatcagcgccttgttgcagctgagccagcagctcgttggctttcttttcgtcatccaccaggatgtgtagtgcagaagcggtattcgccatgataagggacctttagataagattaatcaaagactgctcaggggcgtaatgtaacatttgccacgtcggatgtggaccgcacaatgccgtcttaccgctgaaccttacacttttgactgtcttttctggcggaagtttctgctacaatcgccgtcccgcgtctatcaagtgagcagaattaacccaatgcgattaaatcccagtcaacaacatgccgtcgaatttgttaccggaccctgcctggtgctggccggtgccggctcgggtaaaacgcgggttatcaccaacaaaatcgctcacctgatccgtgaatgcggctaccaggcgcgtcatatagccgccgtgacctttaccaacaaggccgcacgcgagatgaaagagcgcgtcgcgcaaacgctggggcgaaaagagtcgcgcgggctactgatttctaccttccataccttggggctggaaatcataaaacgcgaatttgcagcactcggcatgaaatccaatttctcgctgtttgacgatcaggaccagttggcgttactgaaagaactcagcgaaaaatggctcgaaaacgacaagacgttgctgcaacagttgatctcgacgatctccaactggaaaaacgatcttatcgacccggcggggcggcgaagactgcgcgttccgaacgcgacaagatttttgcccactgttatagcctgtatcacgaccacatgcgcgcctgtaacatcctcgatttcgacgatctgatcctgctgccgacgctgctccttcagcgcaacgaggaggtacgggagcgctggcagaataagttgcgttatttgctggtcgatgaatatcaggacaccaacaccagccagtacatgatggttaaactgctggtgggcaatcgcgctcgctttaccgtggtcggcgacgacgaccagtcaatctattcgtggcgcggtgcgcgtccgcaaaacctggtgctgctaaaagaggatttccccgcgttgcaggttatcaaacttgagcagaactaccgctcgtcgcagcgtatcctcaaggccgccaacatcctgattgccaacaacccgcacgtgtttgagaaaaggctgttctccgagctggcctatggcgaacccttgaaggtgattaccgccaataatgaagatcatgaggcagagcgcgtggtgggtgagctgattgcgcaccggtttgtcaaaaaaaccaattacggcgattacgccattctgtatcgcggaaaccaccagtcgcggctgtttgaaaagatgctgatgcagaaccgtattccctaccgtatttctggcggtacgtcgttcttctcgcggcctgaaatcaaagacctgctggcttatttgcgggtgctgaccaatcctgatgacgacagcgccttcctgcgcatcgtcaacactccacggcgtgagattggtgccgcaacgctgcaaaagctcggtgaatgggctaaccagcgcaataaaggcctcttcaaggcgagcttcgacttaggactgagccagtatctgaccggccggggactcgaggcattgcagcgattcactcactggatgggcaatatcgccgaactggccgagcgcgaacccatcgccgccgttcgcgatctgattcacggcatggattacgaaagctggctgttcgaaacctcgccaagcccgaaagcggcggaaatgcgcatgaaaaacgtcaatcagctgttcagctggatgacggaaatgctcgaaggcagcgacctcgatgagccgatgacgctgactcaggtggtgacccgcttcacgctgcgcgacatgatggagcgcggtgagagcgaagaggagctggatcaggtccaactgatgacgctgcacgcctctaaggggctggagtttccctatgtgtttctgattggcatggaagaggggctgttgccgcatcaaagcagtatggatgaggacaacgtcgatgaagagcggcgactggcctacgtcggcattacccgtgcgcagaaagagctgattttcagccactgccgtgaacgcaggcagtacggcgagctgatccgcccggagataagccgcttcctgcatgaattaccgcaggatgatttggcctgggaaagcgagcgtaaagtggtgtcgccacaggagaggatggtgaagggacagagccatctggagaagatccgcgctcagctggccgaggccaagaaaaagggagcctaaggctccctgatacgttaattatattgcatgaacgtcgtttatttgctggcttcttctatgaacagcggccaatggacgtaactttgccaatgactttcctgctccagctcttcggcccgcagcggatgctgttccagccatccgtgaggcactaacacgttcaactcatcatcattagcccgcaggcgaaccgcaggcagcgtgtcatcacgacgacggctggcgaagataatcgccagtcgcatgatgcgacacagacgctcggcctgacgcggcggcagggcgttttgctggttaagcagcggcagatccaggttattgctctggttttgcagcagcgttgccagcagttttttctgcgccggagtaaaaccgggtaaatcgagatgacgaatcaggtaacctgcgtgattctgcgcctgcttgaaatcaacgctcagcccaatctcatggatcagacaggcgctagccagcagctcacgggcgcgggcatccagctgccaggtgtttgacacctgaacggaaaagttctcggcaagcgccgcaacgcgattcgcctgctcaacgtcgagcagatagcggcgttgcaggttgtgcagggtgcgttgacgaatgtcctgttcaacgggcagatgcagcatgccgtacaccagaccctcgcgcagcgcgccacccgccagcatcatggattcaatattcaacgttttgaagatagcaattaggatggacagcccgcttgggaacaccagtgcacgctcaagcgtgagcccttcaatttcgagctcttcgagcttgccacactgaatggcacgctgtttgagctgctgtagcttggagagggtaatccgttcgtccatcccctgcgccaccatgatttcctgcaatgcctgcaccgtaccggacgcgccaacgcagacctgccagccgttggcgagcagttcgggtgcgacgggggtaatcatttcaactgcggctagctcggccttgtcaaaattctctttgaccaggcttcggtcggtgaaatagcgttcgagccaggtcacgcagcccatagacaggctgaacaacgtgttggcctgtgcgcctgaaccggtaaccagttcggtgcttccgccgccgatatccaccaccaggcgctggtcaggaccgccggtggtgtgggccacgccctgataaatcaggcgtgcttcttcttcaccgctaatgacctgaatattacagccaagaatggtttcagcggttttcaaaaactcatcggcattttttgccaggcgcagtgtcgccgttgcaaccacgcggatctgttcgcgcgggatatcctgtagacgctcggaaaataatttcaggcattgccatcctcgctgcatcgcttcggcggagaggtgactatttttatccagcccggccgccagacgcactttgcgtttaattctggccaaggtttgaatactgcctgccacctcacggacgaccaacatatgaaagctgttggaacccagatcgatcgctgcataaagtgaggtggagctcagcataatttttttcagcccgaacgtttacggttgttacgtggtgcattgccaccgcgtcgtgatgaagatgaattacggcgtgggccgttgccggtgcgcgtacgtgccagacgttttggtgccggcaggtcggttagaagcgcatcactgttgtatttactgacgggaatgctgtggccggtataggtttcgatggccggcagattcagcgcatattcttcacatgccaggctgattgagtgtccgctcaggccagcacgaccggtacggccgatgcggtgaacgtagtcttcgcagtcgtcaggcaggtcatagttgaagacgtgggtcacggctggaatgtgcagaccacgggcagcaacgtcggttgcgaccagaatgtcgatgtcacccttagtgaagtcttcgagcacgcgcaggcgttttttctgcgccacgtcgccggtcagcaggcctacgcggtgtccgtcggcagccaggtggccccagacatcttcacagcggtgcttggtgttggcgaagataatgcagcggtctggccactcttcttctattaaggtttgcagcaggcgcatcttttcttcgtttgaaggatagaaaagctcttcctggatgcggtgacccgttttctgttccggttcgatctcaatcgattcggcgttgttcatgttttcaaacgccagctctttaacgcggtaggacagcgttgccgagaacagcatgttcaggcgttgagtcgcaggcggcatgcggcggaacaaccagcgaatatctttgataaaaccgaggtcgaacatgcggtcggcttcatccagtaccacgacctggattgcacccagattaatatggttctgttttgcgtaatcgattaaccggccagtcgtgccgatcaggatatcgacgccactttccagcactttaagctgtttgtcgtagccgtcgccgccgtaggccagaccgagtttcagtccggtggattcggagagcgcttcggcgtccgaatgaatttgtaccgccaattcccgcgtcggtgccataattaaagcacgtggctgattggtctgacgaccttcagcagccgggttagaaagcagataatggaaagtagacgctaaaaaagccagcgtcttgccggtaccggtttgcgcctgacctgcaacatcacgtcctgagagcgtgataggcaatgcgagtgcctgaataggcgtgcagtaatgaaaccctttcttttcaagggcttcgactgctagcgggtgcagggcgaagtcggaaaacttctgttcggttaagtgtgttttgctcatagtgtggtagaatatcagctaactattgctttacgaaagcatatccgttgaaataaacatggtgaaatagagtcaacctactgttggttaatgctacatcaacaaggtaaagataaatcctttggagtagaacatgagcgataaaattattcacctttctgatgacagtttcgacaaagacgtactgaaagccgaaggactggtgctggtcgatttctgggcagaatggtgtggtccatgcaagatgattgctccgatcctggacgaaattgccaccgagttcgaaggcaagctgactattgccaagctgaacatcgatgaaaacccgggcaccgcaccaaaatacggtatccgtggcattcctaccctgctgctgttcaaaggcggcgaagtggctgcgactaaagtcggcgcactgtctaaaggtcagctgaaagatttcctgaacgccaatctgtaatagatttgaatgacctaaatcaggcgtttggcgggctacgtgtgtttttcacactgaccgctagacgcctgcaaagaagcgtgctaagtttacgcttactgcatatttaagcttacctgtagtttgattctagcgttttattctgtgttgaaaacatctgcctattaaagttgctttgataaaaactgcttgcgtagaaaacgacttgttgaaaaacaggtgtaatggcgatgtgctttgacaatcttacggtttaaaaaaaatcggctttgagacaccttcaatttaagtctgccctctttcaagaaatagttcgcgagtcaacacgcccgtgacctttaatcagaagctgcaaattgagagtctctaccctaaaagtaatttaagctggcatggacgtccttgccatccccattcacgacagattttcgagacctaccccgagtttaagaacccaccattatgaatcttaccgaattaaagaatacgccggtttctgacctgattacactcggcgaaaatatgggactggaaaaccaggcccgcatgcgtaagcaagacattatcttttcaatactgaagcagcatgccaaaagcggagaagatatcttcggtgacggtgttctggagatactgcaggacggatttggtttcctccgctcagcagacagctcctacctcgccggtccagatgatatttacgtttctcccagccaaatccgccgcttcaatctccgtaccggtgacactatttccggtaaaatccgtccgccaaaagaaggcgagcgctattttgccctgttgaaagttaacgaagttaactacgacaaaccagaaaatgcccgtaacaaaatcctgttcgagaacttgaccccactgcacgccaactcacgtttgcgcatggagcgtggtaacggttctaccgaagatttgaccgcacgcgtactcgacctggcatcgccaattggccgtggccagcgtggtctgattgtggcaccgcctaaagccggtaaaaccatgctgctgcagaacattgcgcaaagcattgcctacaaccacccagactgcgtactgatggtactgctgattgacgaacgtccggaagaagtgaccgagatgcagcgtctggttaaaggtgaagtagttgcttctaccttcgacgaacctgcatctcgccacgttcaggtagccgaaatggttatcgagaaggccaagcgtctggttgagcacaagaaagacgttatcatcctgctggactccattacccgtctggcgcgtgcttacaacaccgtggttcctgcatcaggtaaagtcctgaccggtggtgttgacgccaacgccctgcatcgtccaaaacgcttcttcggtgcagcacgtaacgtggaagagggcggcagcctgactatcatcgcgaccgcgctggttgataccggttcgaaaatggatgaagtcatctacgaagagttcaaaggtacaggtaacatggaactgcacctcgcgcgtaaaatcgccgagaaacgtgtattcccggctatcgattacaaccgctccggtacccgtaaagaagagctactcaccacttctgaagaactgcagaagatgtggatcctgcgtaaaattatccatccaatgggtgaaatcgacgcaatggaattcctcatcaacaagttggccatgaccaaaaccaacgatgaattcttcgatatgatgaaacgttcataattttactctgcccgccaacttgccgctgcaagtgaaatgggtataacgtaaaaatattaaaacgctgcgtgaagacgtggcgttttttacgtttggtcgctacgatgtgtagtaatgcacggcgcactgcgccttatgcaccctagaatcagataacaccggatagcctcaacgggcatcattcattaatttgtcgctgtataaaagcggacaggaaggatccttcggacgacgcacaaaacgtaataaaatccgaaagccacataggatatgaacgcaaaaccgcgaggtggtaatgactactgccaaattcaagaccaggctgccagatagcttgcgcagatttaccattaatgcagagacgttttaactgtgaatttactcactatgagtactgagctcgtcattgttttcttgttttcatttgtctttttatttttggcgcgcaaagtggccaaaaagattggattagttgataaacctgactaccgcaaacgccatcaaggacttatcccctggttggcggtatctctgtctatgcagtggtctgttttacctttttcattactaacattcagatcccccataagttgctttatctcgcctgcgcgggattattggtattggtgggtgcgctggatgacaaatacgacatcagcgtaaaaatccgcgcctgcattcaggcactcgttgccgtcatcatgatgatttacggtgatatggtgctgcatgacctggggcgcattatcggtccctggcagatgttcctcggcccgtttggctatctggttaccctgtttgccgtatgggctgccatcaacgccttcaacatggttgacggtatagacggtctgctgggcgggctgtcgtgcgtgaccttcggctcaatgggcatcgtgatgctgtccaaaggctacgactcgttggcgctgtggtgcttcacgatgattgccgccatcattccttatgtgctgctgaacctcggtgtttttggccgtcgttacaaggtatttatgggcgatgcgggcagtacgcttatcggctttaccgtgatctggatcctgctgcaatgcacccagagcacgcgcagcttcgcgcatccgccgatgacccccgtgaccgcgctatggctcatcgccattccactgatggacatgattgccatcatgtatcgccgtctgcgcaagggaatgagtcccttctcggcggaccgtcagcacatccaccatctgattatgcgggcgggattctcctcgcgtcaggcttttgtactgatcaccttggccgctgccgtgctggccgctatcggcgtggccggtgagcgacttcacttccccgaatggttaatgcttgggctattctttgtcgcattcatgctctatggctattgtattaaacgtgcgtggcgcgtggcgcggttgctcaaacgtgtcaaaagaaggctgcgtcgtcactccgcacaatagcgtcgccttaccgtctgctataccgtcaccagggatcacacgccgcgtctgactccgtctgatggcaacacaattaattaatcaaaatttggtgggaatgatgaagtcagagacgatgtctacagggaacgaactcgccgttgataatgaactggatattcgcgggctgtgccgtgcgctgtggcagggaaaactgtggattatcggtctggcgctcgggtttgccctcgtcgcggtactggtttcactgctgatgaagcaggagtggagcaccaccgccgtcactgacaagcctactgttaacaatctggcgtcatacttctcgcaggagcagttcctgcgcaatctcgatgccaaaaacacctttaccccggcgggcgatcaggcctcgatttccgatgacgcctacggtgaattcgtgatgcagctggccgcctacgatacccgccgggatttctggctgcaaaacccttactacattcaacgcaagaccggcgaaagcggagccgatgccgtgctgctcgacaaactgatcggtgcgattcagttcaccgcgcgcgacgagaagaagatgcctaacgacagcgtaaaactgaccgctgagaccgccgccgacgccaacaagctgttgcgtcagtacgtcagcttcgccagcgcacgcgctgcccagcatctgtatgacgaaatcgaaggtgcctgggccgcacgcacgcagtcgatgaaggcgcaggttaaacgtcaggaagaggtagcgaccgccatttataaccgcgaactgaacaacacccagcaagcgttgaagattgccgagcagcagaatatcgaccacagcatgaccgacgccacgccggaccgcctgccggactccgagatgttcctgttgggtacgccgatgctacaggcgaagttaaagctgctgcaggcctcaggcccgagttttgatatcgattacgatcagaataaagcgatgttggctacgcttaatgttgggcccgtattgaacgccaaattccagacataccgctacctgcgcacgccggaagagccggtaaaacgcgacagcccgcgccgcgtattcctggcaatcatgtggggagttgtgggtggatttatcggtgccggtgtggcgctggtccgccgtcgcgtaaaaacagcagaataaaaaataaaaaaagatagcgatgaataatcgggcgtctttgacgcgcccgctccgcaggaaagcgctgcgcctatcaaaagagagtgcctctgtgaaagtattaacgattttcggtaccaggccggaagcaataaaaatggcacccctggtacatgctttggctcaggatgatgcctttgattctaaagtttgtgtgactgcccagcatcgtcagatgctggatcaggtgttaggtcttttctccatcaagccggattacgatctcgatatcatgaaaccgggtcaggacctgaccgaaatcaccagccgcattctgctggggctcaagccggtgcttgaggattttaaaccggacgtcgttctggttcacggcgataccacaaccgcgctgactgccagtcttgccgcgttttatcagcagatcccgatcggtcacgttgaggcgggtttgcgcaccggagacatgctttctccgtggccggaagagggtaaccgtcggttgaccggccatctggccaagtggcattttgcgccgaccgcgctgtcgcgtagcaatctcatgcgcgaagggatcgacgcacaggatattattgtgaccggcaacacggtgattgatgcgctgctgtgggtgcgtaatctgctcaatcagtcccccgaactcagggcggatgtcgcaaggcgctacgattttattagcccgcaaaagaaactgattctggtcactggtcatcgacgcgagagcttcggtgacggttttgagcgtatttgtagcgcattggccgagatagccagacagcatgccgatgcgcaaatactctatccggtgcaccttaacccgcaggttcgcgagccggttaatcgcatcctgcagggtatcgataacgtcatcttgattgagccgcaggactatctgccgttcgtttatctgatggacagcgcctatctgatccttaccgattcgggggcattcaggaagaggcgccgtcgttgggcaagccggtattggtgatgcgtgagacaaccgagaggcccgaggccatcgaagcaggcaccgttaaactggtcggaacgcacaccgcgagtatcgtcagcgaagtgtccaacctgctgaacgacgccgatgcctatcaacgcatgagtcgggcgcataatccttatggtgacggcagcgcctgtgaccaaattttggcggcactcaagaaaactcgagaattaccatgactctaacaacctttccgagtgtgaataaacaccgagcctttgaaaccatctctgtcatcgggctgggctatatcgggctgccgacggccgccgccttcgcctcgcggcaaaaaaaggtcattggtgtcgatatcaatcagcgtgcggtcgacatcatcaaccgcggcggcgtacatattgtcgagccagagcttgaagaactggtgaaaaaggcggtagacgagggctttctcgaggcagtgaccgccccacggcccgctgacgccttcctgattgccgtgccgacgccgttcaaggacgggcatcagccggatctggattacgtcgagcaggcggtcaatgcacttgcgccagtgctcaagaagggcgacctgattattctcgagtcgacctcaccggtcggagcaaccgagcaaatggcggactggctcgccgcgctgcgccctgacctgtgttttccgcagcaagacgcggccgcgcccgatgtgaatattgcctactgcccagagcgggtgctgccgggcaaggtcatggttgagctcattaaaaatgaccgcgtgattggcggtatgacccgcgagtgttcggcgcgtgccagcgagctctataatatctttctgttgggcgaatgcgtggtcactaatagccgcaccgccgagatgtgcaagctgaccgaaaacagtttccgcgacgtgaacatcgcgtttgccaatgagctttcgctgatttgtgacgtgcagggcatcaacgtctgggagcttatccgtctggcgaaccgtcatccgcgggtcaacattctgcaacccggtcccggcgtgggtgggcactgtatcgctgtcgatccgtggtttatcgtttctcagcatccttctcttgcgcggcttattcataccgcccgcgtggtcaacgatgctaagcctttctgggtggtcgacaaggtgaaagcagcggtcgccgactgtctcgcctcaaccggtctgcgtgccgccgaggtgaagattgcctgcttcgggctggcgtttaaaccgaacatcgacgacctgcgtgaaagccctgcggttcatgtcgccgagctgattgccgactggcatgcaggagaaacctgggtggtggagccgaacgtgccccatctgccgccagcgcttgagaacaaggttaagctccagtcgttagagttcgcgctgcaacaggccgacgtgctggtgatgctggtcgaccatgcggtgtttaagctcatccccggccagcagatcaagcaagactggatagtcgataccaaaggcgtatggcgttaagccagccttaagcgaaacgtgtaatggtgaactctggccgatggcatgaggttccaaatgaacgataatcatatccgcggacgacttgactatttgcagtgggaaagtgattttttcttcaggccgagcgctaaactgacgctggattcggcgggggagaagctgacgcgcgaggcgctaagcgcttatccactggttcaggtcaaggtcccggcagacgaaagtgatattctcgagacgctttatcgcctgggatttcgtatggttgaaggggagatcgatttctcgctcaaccttctcgacggtgaagcgtttccctgtgaatatcaggttgccagcgaggcagatatcctgcgggtgagccagctggccgccggtgcgtttcagctgagccgctttcgcgcgccctggtatgagcccgatgactcgggacggttctatgccctgtgggccgaaaaagccattctaggtacctttgatacccactgcctgacgctgctcgccgatgacggccagctgctgggtttcgtcacgctaaggactctcgaacccggcgtggcgcggataggcctgctggccgtgcagccgcaggtgaccggtcgaggtatcggtaagcgtttaatgcacgccgctaaacactggtgtctggcgcagggtgtaacgcagctcagggtcgccactcaaacgggaaatattgccgcattaaacctctatcgcgccagcggcggtgttctttctcattcagcctattggttgtacaggtaattttatgatcccatttaactcgccgcctatcgtcggtaccgagctggactacatgcaggccgcgatgggcagtggcaaactctgcggcgacggcggtttcactcgtcgctgccagcagtggttcgagaaaaacttccgcagcaggaaggtgttactgacgccatcctgcaccgcctctctggagatggccgctatcctgttggacatcaagcccggcgacgaagttatcatgcctagctatacttttgtctcgaccgccaacgcctttgtgctgcgcggtgcacgcatcgtgttcgtcgatatccgccctgacaccatgaacatcgatgagacgctgattgaggcggccattaccgacaaaacgcgggcaattgtgcccgtacactatgccggcgtggcctgcgaaatggacaccatcatggcgctggccgagaaacacggtcttttcgtcgtcgaagatgcggcgcagggcgtgatgtcgacctataaaggccgcgcgcttggcaccctcggccatattggttgtttcagcttccatgagacaaaaaactacaccgccgggggcgaagggggcgcgaccctgattaacagtcctgagctggtggaacgagccgagataattcgtgagaaaggcaccaaccgtagccagttcttccgtggacaggtcgataaatatacctggcgcgacatcggttccagctatctgatggcagatttgcaggccgcctatctgtgggcacagcttgaggtggcgcaggagattaacaagcatcgcctcgagctgtggaaacactattatcgggcgttgaaaccgttgcaggacagtggccagctggtgttgccgacgctagcgccgcactgtgcccacaacgcgcacatgttctacatcaagctcaaggatacggaacaacgtgacgcctttatcgcctatatgaaagaggcggagatcctcaccgttttccactacatccctctgcactcctcgacggcaggagaaaagttcgggtatttccacggtgaagacgtcttcaccaccgaggaaagcgccaaactggttcgtctgccgctgttttacaatatgagcaatgtgatgcaaaaaacggtgatttctaccctgctgagcttcttcgcctgatatgtctctcgctaaagcctctatttggaccgccggttcgacgctgattaaaatcggtgccggtctggtggtcatcaaactgcttgccgtcgcctttgggccgagcggcgtgggacaagcggggaactttcgtcagctgattaccgtattaggcgtactctccgggccgggatattcaacggcgtcaccaagtatgttgctgaaaatcatcagcatcccgacaggctgaaagcggtgctggggactgcttcgaccctgattctcagtttctcgaccctgctggcgctggtgtttctgctcgccgccgagccaataagcgtggcgctgttcggccacggcgaataccagtcggtggtgcgggcggtggcgttaatccagatgggcattgcctatgccaacctgtttcaggctattttaaagggctatcgtgacgcgcagggtaacgcgctgacggtcatcgccggtagccttattggcctgctggcctactggatttgtttcacagtgggcggatatcgcggggcgctgatgggtttcgcgctggttccggcgctggtggtgttgcccgctgccgcgatgctgttgcgccgccgcacgtttgcgcttaactttttaacaccgagctgggacagcgagctggcgcgtcatttcggcaagtttaccctgatggcgttgatgacttcggtcacgctgccggtcgcctacgtcatgatgcgtaacctgctggcggaacgcgatggatggcaggcggtggggatttggcagggcgtgagcagtatttcagatgcctacctgcagttcatcactgcctcatttagcgtctatcttttgccgacgctggcgagactgactgataaagaagagatagccaaagaaatcatcaaggcgctgaagtttgtgatgccggtggtggccgcggccagctttaccgtctggctgctgcgtgattttgctatctggctgctgttctcgcatcagttcagcgcgatgcgcgacctcttcgcctggcagctggtggggacgtattaaaagtcagcgcctatatcttcgggtatctggtgattgccaaggcatcgctgcgcttttatctgctcacagaggttagtcagtttttactactgacgctgttttcccattggctgatcccaatacatggcgcactgggtgccgcgcaggcttatatggcgacctacattctctattttgcgctgtgttgtaccttttttgttatctatcgtagacgagcatgacaacgctgattcacgttttgggatctgatatcccgcaccataattcgaccctgctgcacttctttaacgacgtgctggttccccgtgtgccgcgcgaaagtgtgcgaaacttcatggtggtaagccgtgaccctgccttgctgccggtttttgaacaccttgatattcagacgctgagcgacaagaagtcattggcgcaggcggtgatagccagagcgcaggccgacagaaactgccgcttctttttccacggccagtttaatcccggcatttggctcgccctgctgagcggaaaaatcaaggcgcgtcaggtgttgtggcacgtttggggtgccgacctctatgaaacctcgggcagcttaaagtttagaatgttttatttgctgcgccgcctggcacagggccgcgttggccacgtttttgctacccgcggcgatttagcctattaccgccatcgtcatccgcacgtcgcgtcatcgctgctctattttccgacccgcatggacccctcgttgacgttggccgccgatgcgccgcctcctgaaggcatgcctcgcgtactggtcggcaattccggtgacccaagcaacctgcacatcgaggcgcttcacgcgctgcataaagcgtggggagcgggtatcaaggtggtgattccaatggggtatccggcaaataatcagccgtatattgagcaggtacgccgtgaggcgctcgcgcttttcccggcggaaaacgtcgagttgctcaccgaatcgatggcctttgatgactacctgcaaatgctcaaagattgctcgctgggctattttatttttgaaaggcagcaggggatcggcacgctttgcctgctcatccagttcggtgtgcccttcgtgctgagccgcaagaatccgttttggcgcgacatggcgagtgaaaatctgccggtgctgttttatggcgatccgctcgacgccgccactctggccgaggcgcgccgtcaactgctggccaccgatcgccagaagattcaattttttagccccaactatatcgagggctgggtgcaggccctggaaatagccacaggagtggcatcatgacgctggcgcagttgggcggcctgagcgtcgtctatgctttatccctgttgtttattctgacgctgacctatctcgagttccgccgggttcggttcagctttaacctgttcttttccgtgctttatctgctgaccttctactttggttttccgctcacctgcctgctggtgttccagtttgataccgaggtggtgccggtggcgtatctgctgcaggcgatgctgtctgcgacctgcttctatgcgctctactatgtggtgtacaagacgcggctgcgcaaggcgcgtgcgggtccgggccgcgaggtgtttggcatcaaccgcgtcgaggcgcatctcacctggataatcatggcgctggtcgccatcgtcacgctaggcatcttcttcgcccacaacggtttcctgttgttcaagctgacgtcttacagccagatcttctcgagcaacgtatcgggcgtcgcgctcaagcgtttcttctacttctttattcccgcgatgctagtggtctattttcttaagcagaacagccgtaactggctgttattcctggtgactacctttgcctttggtttgttgacctacgtggtagtgggcggcacgcgtgccaatatcatcatcgcgctggctctgttcttattcatcggcattattcgcggctggataacgctgtggatgctgctgctggccggtattatgtcggtggtcggcatgttctggttggcgttgaagcgttacaacctcgacgtcagcggtccggaagcgttttataccttcctctatctgacccgcgataccttctcgccgtgggagaatcttgcgctgctgctgcaaaactacgacaagattcatttccaggggctgatgccgattatccgcgacttctacgttttcatcccgagttggctgtggccgggcaggccctcagcggtcatgaataccgccaactatttcacctgggacgtgttgaaaaaccattccgggctggcgatttctccgacgctgataggctccttggtagtgatgggcggcgcgagctttatcccactcggtgcggtggcggtagggctgattatcaaatggtttgactggctttacgctctcggcaaaaacgccgccaatccttataaggccgccatcctgcagagcttctgttttggtgcggtattcaatatgatcgtgctggcgcgcgaaggtgtggactcgttcttctcgcgggtgatcttttttgccttggtgtttggcctgtgcctgattgccgccaagctgttgtactggctgtttgacgtggccggattgataaaagtgcgcacgcggcgtttcacccacgttgaccccgtcgcggtggctgagccgtacctgcgcgataaaggataatgatggattcgacttctgctccgctctctattccccgctacagcattcgtggcatcgatctgtggggatttcgcaacatggaccagtttggcgattacctgctctccgaagaggggttaaggtcggcacgctggttgccatcaacgccgaaaaagtgctgaccgccgagcgcgacgcccagctgcgcgcgctcatcaaagaggcagactataaatatgccgacggcatcagcatcgttaagtccattcgccgcaaatatcccgaggcgcaggttgagcgcgtcgcgggggcagacctgtgggaggcggtgatggagcgcgccggaagactgggtacgccggtctttctgatcggtggccgcgaagacgttttagcaaaaaccgcagacaaactgcgcacgcgctggaacgtgaatattgttggcagccagaacggttttttcacccccgccgatcgcgacgcgctgtttgcccgtgttaaatccagcggcgcgaaggtggtaacggtggccatggggtcgccgcggcaggaaatcctgatgcgcgactgccgtatagtgtatcccgatgcgctctatatgggcgtcgggggacctacgacgtatttatcggcgcggtgaaacgtgcgccgaaggcctggcagaaactcggactggaatggttgtatcgcctgctcaagcagccgagccgcctgccgcgtcagctcaggctgcttaaatatttgttttatttcatcacccgccgcctgtaagtcacgccctgatggcccgcgatttcgtttgggccatcacaatttgcctttgccctcccgccgaaatttcgaactgctccgctattttgtctattcccgtttgcaactgactgcaaaatacggaaccataccgccgttttatctgccctgaccttgggaaacaacaataatattccggcaaacccggaaaaaagaacaaacacaacatattgagaatcagaggacttatggcgagtagcgaagagaaaaaggggctccaccgagggttggaggcgcgccacattgagttgatagctttgggcggaactatcggggtcggactattcatggggcggcaagtacgctcaaatgggcggggccctccgttttgctggcgtatattctggccggcgtttttgtgtttttcatcatgcgttcaatgggcgagatgctgcatctcgaaccggtggcgggatcctttgccgtttatgcccataagtatctgggaccttatttcggctatctgaccgcatggagctattggttcatgtggatagcggtggggatatcggaaatcaccgccatcggcgtctatgcccaatactggttcccggaattgccccagtggataccggcgctggcggccgtcgccattgtcgccgcagccaacctggccgcagtaaagctgtatggcgagatggaattctggtttgcgctgattaagataactaccatcattgtgatgattgttgtgggtctggcggtgatcttcttcggtttcggaaatcatgggcaggctattggctttgataacctgaccgtgcacggcggcttctttgccggggctggaagggcttcctgtttgcactttgtatcgtcgtcgcgtcttatcagggcgtcgagctggtcgggattaccgccggtgaagccaagaatccgcaggttacgctgaagcgtgctatcaataatattctttggcgtatcctgattttctacgtcggtgcgattttcgtcatcattactatcttcccatggaatgagatgggcacccacggcagcccgttcgtgttgaccttcgccaaagtgggcatcactgccgccgccggtattatcaactttgtggtgctgaccgctgcgctctcgggctgtaacagcggcatgtacagctgtggacgtatgctctacgcgctgtcgcaaaatcgtcagctgcctgcattcttgtcaaaagtgtcggccagcggtgtgccggtgtacggtattgcggtaacgattctgtgcctgcttgtaggctcgtgcctgaactaccttatccctaacctgagcaggtttttgtttatgtctacagcgcaagcgtgctgccgggcatggtgccgtggtttgtggtgctggtaagccagctgcgtttccgtgaggcgcatcgcgccgcgctgaagaatcacccgttcaagtcgattatgttcccttataccaactatctgacgctggcattcctgctttgtgtgctggtgggcatggcaattaacccggatacgcgcgtttctttgcttgttggcgggatttttattgccgctgtgtcacttatttatctcgcgctggggatgaatcgccgtagtcattaagggtcttgaagggtgaaaagtacgggtggggaccctgaaatgcttacttttagtgcgtaatggacaattcgtaatcaaacgaaactttttcaaaaaaaagcactagacagcatgacggttaagccgtagtatccccacccgcaacggcgctaagcgcccgtagctcagctggatagagcgctgccctccggaggcagaggtctcaggttcgaatcctgtcgggcgcaccattgacctcggttggttttgcgcaaagagttgcggtgttagtttcggacgtgaagtaaagatacgatggtggctatagctcagttggtagagccctggattgtgattccagttgtcgtgggttcgagtcccattagccacccacttcttcttaatgaagtgagtgtgagtagtaaagagtaaacagtttttgtgacagtgcgaaggtggcggaattggtagacgcgctagcttcaggtgttagtgttcttacggacgtgagggttcaagtccctctcttcgcaccacacgaaagcgttaaaactctgcacgtgacggaagacaggttgtaaaagaaagcagtacatcggcgagtagcgcagcttggtagcgcaactggtttgggaccagtgggtcggaggttcgaatcctctctcgccgaccaattcaaacaaaaagccctgcagaaatgcagggctttttgttttccgttattccccgttttgattccttaccctgcggtacagatcacaaaacacccccacctaaaaacgttataactctttggctaataagcacagttcatttgaacggaatcatgcgtgtccgaaaaaagcgatgcgccgccaaagggaatactatgaaaataactaaaatcggcctgtttacggcctgtactctgctttctgcgcccgcttgggccgcgcctcagctcaaagatgcggaatctatcaccgccgttatctcagccatgacgccggaagaaaaggctgcgctggtttccggcaccggcatgaataacgcgacccacgtcgcgggtgccgcaggttcgacctttgccatacccaggctgggtattccacagattgtttttgccgacgggccgattggcgtcagactgggcgcaggcccaaccggcggtgaaaagcgctttgctactggcttcccggtttccgtggcgatggccgcgacttgggatccggcactcattcagcgcgtgggcggcgcgataggcgatgaagcacgcgcctatggcgtcgatctcatgctcggtccggcgattaatatccagcgtaatccactcaatggccgcaacttcgaatatttctccgaagatccgttgctcaacgcgatgataaccgcaggctatatcaagggtatgcaggcagaggggtcggtgcggtgctcaaacactttgccgccaacaatcaggaaacgcgccgccagacggtaaatgaaattatctcggagcgcgcgctgcacgagatttatttccctggctttgaatacgcaatggaaaacgctcagccttgggcggtgatgagctcgtatccttccatcaacggaacgccgtcgtcgcaaaacccgtggttattgaaagaggttctgcgcaagcagtggaagtttaacggttttgtcatgtcggactggtatggcgtgaccgatccggtgcgtgcgctgctggccggtaacgatctcaatatgccgggcggcttgtccaaaaaggacacccctttcctgcgccgcaataccgacccgaaagacgtggtgcttgcggcgctgaagtcgggtgagattagccaaaaccagatagacgagaatattcgcaacatcctcaacgtggtcattaagacacagcgctttaaaaatccttccgccgcagcccagccggagatggccgaccatgcggcgctggcacgcgaggccgccgctgagtcgatggtattgttaaaaaatgaagcgaacacgctgcccattaagtccaacttgaaggtggctgcttttggtcacaacgttgagaatttttacgtcgtgggtggcggtagcgccgaggttaacattgccctaatcgccgggtaacgctgccgcaggggctgaaaaatgcgggactgacgcttattgatgacggtaaacaggcgctggacgagaacgccaaaaatgacgccattgcccacgccgcgcagcaaagcgacgttgcgatcgtctcgattggtcgcagctccaccgagggggccgaccgctattcaatggcgatgcacgccgacgaaatcgcgatgatagacaatgtggcgacggcgtttcaccagcagaataaaaaggtagtggtcctgctcaacgtgggttcaccgattgagatagcctcctgggaggacaaggttgatgcaattctgctgacctggcagccgggcgaacaggcgggtaacgcagtggccgatatcctcaccggcaaggtcaatccttctggcaaactgccgctcacgttccctaaacgtctcgaggattcgccgagctacggaaattatccgggcaacgccaaaaccgttaactacggggagggcatctacgtcggttatcgctattatgatacgcgccgcatcgcaccaatgtacccgtttggttatggtctgtcgtattctaccgtccattacgggcaacttaccccgcagaattcacccttcaatattgataagcaggacgcagtcgacgtcagcattaccctaaaaaatacgtcctcggtggcggctaaagaggtggtgcagctttacgtacatgatgatgcctcgcgcctcgacaggccgttgcaggagcttaaagcctttgagaaggtgagtctggcggcaggagaggagaagcgcgtcactttcaggctcgacaagcgggctttttcgtactttgatgccgacatgaatgcctgggtgctggagccggggcacttcacgctgcgcgttggcagttcgtcgcgagatattcgcgctgaggctccgctgagggtcatttctgccaccccggcgttctcgtttgccacgccgtggattgacgtccagacctatgaaaaagcggcgaccattgtggctggcgtgataggtgacgatgagaccaatgcttggatccaggggagtccgacgctgggtgagaaactcgacgcgtcgctgaagctcaagcccgaattggcaaaagatgaggcgaaaaggcaagcggttaagcaggaaattctccagcagatcaacgcgttgtaaccatttggcgacacatgccaataacgcattgttttataagtgaattttactctattttagagcaggtaatcggttatctctccggcgcagggtttaccctgtcgccggagggagacatccatctcattgttttaaaatgatatagggattgcagatcgagactgtcgtttccaggcgacagtctccgcagaggctgcggccgttaacggggtaatccgcagagtatttttaggcgctgaaaaaaaagataaattattaatttattaaatcatgtagttaatttttatttttcaattctttgtgggtttcttaaaaactggcacgccatatgcaataatcaccccgtagatgctcattccaccctcttatgattgcgtagcttcatatacctgggaatgatgcagagccaaattacagtgtctcttgtctatctgaccgataacctcagggttatcaaccagcaggcaaaacgttgagtgtgacactacccctgttgtctaagacctgattgttttgacacttgtctctccggcaagtgtttttttttgcctgccgtctgacgatagccaaaaaaaacggcccgcctgaggcgagccgttgagagtaaaatctgtttaactgactattattgctgagaattattaattgtcagcatcaggccctgatggcgcatctcggcggcttctgccggtttgtgcagcttgtcgagagcatcggccagccaggcgaagtcataggcgtcagggcgctgagacagcgcttcccggaaggcctcgctggcctgcaaccactcaccgtgtttcaacaaaatctggccgagcgtgctgttgagcagcggcgttgaaccattttgcttgatggcctgacgcaggaatttctcgagctgctcaggattcccggagcgcagtttaggcatcatcgcgaccaaacgatcgtcatactgacgcttcaggccgtcgaggatcacttcctgagccaagtcgtgatcgttgcacttaatcagatgggccgccatcgccacttgcagcgcgggctcatggcgagttttacggctctgatttttccaccagcgcttcagaccttcgctgccttcttccgacatcagctgattcatcatgccgaggtaggctttttcctgaacctgctggagctgctcgtcgtcatagatattagcttttgccatcgacggcagaatttccagtaccgacgcataggcaccggtgcgcatatacgcctgttccgctagtctcaggatctctggatggcgaggcgacagacctatcaggcggtcaacgccatggcgcgccgcgtggatttcgccctgtgccaactgaatacgcactcgggtgatatcgaccggcagttggtcggtatcggcaatttccgctgcacgttcgagatactgattggtgcgcacctcgtcaccgcgctgcgaggcggcctcggcagccagcaggtaattaaccatgggctgttcggcgtgatcggcatgactggcgagcagtttttccatctgacgatggtcgccctccgccagtttgatcatcgcgcgctgcgtctgtctgcgcgcctttgaacgtttacggccgacaaaccagccgcgtgtacgcgcgccagtgtggaacacgcggcgcagtacccattcaatgaagaacagcaccacaaagagcagaatcgccataatcaccaggccggtgacgctggtttcaacgttgtagttgtcggtctggatcaacacataaccctgatgaccggccaacattgggccaacgacaatcccggcgataacgatcagaaacagtatgagaacacgtagcatgcgttattccccctgtttggtcgtggcggccggctgttgaagcagattacgcacgcgcgtctgcatcagtttttccagcatcggctggcttttcagctggtctggaacgtccatggaaacagactgttggctcagattgtccagatcggcaaggaacgccttggtggttggatcagtggtatcgaaataggcgcgaacccaggtctccaccgtttccagcgactgtttgtagatttcattctggtggcgcggtaccgcctgtgcggcaatcagcagacgagagcggatattctcacgcagatagatgtcctgattcggtgccagcagcggctcggcgctggtgtcgcgacgacgaatggtgatgaagtcggacatgaagttgtgccagctcttgctcaggttctgacgccattcggtcagggagcctgaaagctcaccgctgtcgctgtccatcggcgaatcgtcggtgtcgttatccgccagacgcaggttatcgacctgatttgaaagctgattaaccttcaggatgatgccatcgaagtcaacctgcgtaaccacagacaggctgccgatgtcttcattaatggccttgcgcacgtcaatcaggcttgggtcattcatgtcggccaggctggcatcggcgcttttcagcagcgcagcagcggtggtgacatcctgatcgctccacagttttcttcccgccagtttgaccaggaagtcggcctgagaaagcatccaggttttggcgtcgctgcctgaaatactggcgactttatcctgcagtatattcagctgacggccgaaggaggcctgctggtttgaggcttcctgcaaggatttaccctgctggtcgagcagcgagtcgatctgttgtttgtcctgctgctggctatttttaagctcggcaagctgggcctgcaacgcttcattggcggaagcttccgcctgggcctgttggtgtccgtgataataaatgcctgcacccagcgcaatcaccaacacaatggcgatcgcacccagtacaggacccgtacgtctttccttttgtacggtttcacgagaagcggtatctggctgttggggctctcaaccgcagtataagtttcatcaacctttgcggaaggatttttttgttccgtcatctgggcacatcccttagtcaggttattttaatgcacggatcagcgcatcattgtctgcgttctctgcaaccctaatagattgccagccaagttggcgggcaagggtcgccaaacgttcacttaccactatcaatgtacagcttaaaagccaggtagttcgatagtaatcaggaactaacgtatataactgttgtaacatttctccgctggtgacgaccagagtattcacccctgcacgctgccagctggagctttgctcactgccgtcatagtgaagcgggctgcgtcgataacattcacagtaggtaatgtttacgccgcgctctttcagcgtgtcggccagcagttcgcgaccgccgttgccgcgcagtatcagggcattgcggcctttgagggactgaagggcgggtagctggagcagcgtttcgctggtttcaccgtcttgcggatagacaataggcaggctggtggcgcgatgcatcagcaaaccggttgttcttccaatagcataatagcttacaaaatcaggccagtgttgcgcatgttgacgcagtgcgcggtcggcgtagttcaccgcgtgctgagaaaggacaaaaataaggtcctgcggcaccagtgaggcgagcatgccgggcagcgcggtaagctcgcttcccggtgcaaactctatcaacggcgagtgataggcaaccctgcccagctggcgcagccgggcgacaagctgttctcctgaaggagaggggcgggtcaccaggatagtcatttcggtgcgttgccctggtagacttcctgcaggatttcacgcgcgccgccgttcagcagttcttcggccaggctaatgcccatgctttctgcttcaaaggcgggaccgcgacgttcgccgcgaaccatctggcttccgtccggcgcgccaaccagcgcacgcagccaaagcgtatcgccttccagttcggcgtagctgccgataggcacctgacagccgccctcaagtcgggtgttcatcgcgcgttcggcgataacgcgcagcgtggtttcgctgtgtgccagcggagcaagcagttcgcgggtgcgcacgtcgtcaagacgacattcaatccccaccgcgccttgtcctacggcaggcaggcactcttccgccgacagtgccgccgtgatgcgagactccaggcctaaacgtttcaacccggcgacggccagaataatggcgtggtaatcaccgttatcgagtttggaaagacgggtacccacattgccgcgcaggtcgcggatttgcaggtcaggacgctgttggcgcaactgacattggcgtcgcaggcttgaagtgcccacgatgctgcccgctggcaggtcagcgaggctggcaaactggttagaaacaaaggcgtcgcgtgggtcttcgcgttcgcaaatggtcaccaggccgagaccttccggaaactctaccggcacgtctttcattgaatgcacggcgatgtcggcgcggccctcgagcatggccaactctaattctttaacgaacaggcctttaccgcccactttcgccaacggagtatcgagaataatgtcgcctttggtcaccataggcactaattcaacctgcaaatcagggtgaaatgccttgagctgactttgaacataatgtgcctgccacagcgctaaaggactctgacgtgtggcaattcggatgattttgtctaccatgatttttaccgtttttctatattgcggaccatcctaccaccgactgcgggaaggtgtcagcgatggatgccatgggcaagggagttagaacgggtaaacagggaaatttgtgacatggcagttcaggaagtaaaatgtatagaggcgcaacagtcattgtggtgctttacttcctttacggtcaaacagcaaggtgttaaattgatcacgtttccagcaataatccgtcaaatacttattttaaattaaagtttataaaactaatggcggatttggatacggggttgtttctagacactggaaaatcaggcgaaaagtcttgtacctctacatcgagacattaaagcagagattggatgcaataaatcagctacgcgttgaccgcgccgtagtggctcagggccccgcttttcagcaggtctatagtctgttgcccgtcctcttacatcatcatcatccgctgatgccgggctaccttgaaggtaaagtgccccatggtgtctgtattttcacgcctgacgaaacccaaactacctatattaactctctcgaagagaaatggggcagcccgtttgaaccggtcgttaaaggcgaactgccgataaccggcgtctattctatgggcagtacctcatcgataggccagagccaaacctcggacctcgatatctgggtctgtcatcaatcctggctcgataacgaagagcgcaaccgcctgcagcaaaagtgcagcctgcttgagaaatgggccgcctcgctgggcgttgaagtcagcttcttcctgattgatgaaaaccgttttcgccataatgaaagcggcagtttgagcggtgaggactgcggttcaacccaacacatcctgctgcttgatgaattttaccgtactgcggttcgtcttgcaggcaagcgtattctgtggaatatggtgcctggcgaagaagaagcgcattacgacgagtatgtcctttccctctattctcagggcgcgttgacgccgaacgaatggctcgacctcggtggcctgagcacgctgtctgccgaagagtattttggtgccagcctgtggcagctgtataaaagcatcgactcgccttataaggcggtgctgaaaacgctgctgctcgaggcctattcttgggaatatcccaatacccagctgctggcaatggacatcaaacagcgcctgcatcagggagaaattgtctgcttcggcctcgatgcttactgcatgatgctcgaacgcgtgacccgctatctgactcaggttgaagactttacgcgccttgacctggtgcgtcgctgcttctatctcaaggtcaacgagaagctgtcccgcccgcgtgcctcggttggctggcgtcgtgaaattctcacccagctggtgagcgagtggggctggagcgaagagcgtctggcgattctcgataatcgcgctaactggaagattgagcgcgtgcgggaggcacacaacgagctgctcgatgcgatgatgcagagctaccgtaacctgattcgtttcgcgcgccgcaataacctgagcgtgagcgccagcccgcaggacatcggcgtgctgacccgcaagctgtacgcggcgtttgaagcgttgccggggaaagtgacgttggttaatccgcagatttccccggatctctccgaggctgacttaacctttattcacgtgcctattggtcgcgctaatcgcaccggctggtatctgtataaccagtcgccgtcgatggactcaattatcagccatcagccgctggaatataaccgctatctcagcaagctggtcgcgtgggcttactttaacgggttgctgaccccgacgacgcggctgcacatcaagagcggcaacctgtgcgatatttccaaactgcgcgaactggtggccgacgtgtcgcaccatttcccgattcgtttgcctgcgccgacgccgaaggccctgtatagcccgtgcgaaattcgccacctgtcaattatcgtcaatctcgagcatgacccgacggcagcgttccgcaatcaggtggtgcattttgacttccgcaaacttgacgtcttcagcttcggtgagaaacagcagtgcctggtcggcagcatcgacctgttgtatcgcaactcgtggaacgaagtgcgtacgctgcacttcaacagtgagcaggcggtgctcgaggcgctaaaaaccattctcggtaagatgcaccaggatgccgcgccgccggaggccgttgaagtcttctgctatagccagcacctgcgtggcctcatccgcacgcgtatccagcagctggtttccgaatgcattgagctgcgtctttcgagcaaacgcctcgagccgggccgattcaaggcggtgagagtctccgggcagacctggggtctgttcttcgagcgcctgagcgtgtcggttcaaaagctggaaaacgccattgagttttacggcgctatctcgaacaacaagctgcacggcctgtcggtgaaggttgatacctcgcaggtgcatctgccgtcagtggtagacggctatgccagcgaagggattattcagttcttcttcgagaccaccgcggacgacgacggtttcaacatctatatcctggatgagtcgaatcgggtcgaggtttatcaccactgcgaaggcagcaaagaggacctggtgcgcgacgtcagccgtttctattcgtcatcgcacgaccgtttcacctatggttccagcttcgtgaacttcaatctgccgcagttctaccagattgtttcaatcgatggccgcacgcaggtcattcccttccgcagcaacgtgctgtctcaactgtgcgcggtcgttcctgaggccggtgccgaacctgccagcccggtgcagcagtttcaaatccactgatccgccgtttttatcctgaacggcgctgcgcgcgatgccgatttttgataatcgattcctattgcttttcatgatccacctgcgattatagagagcttggacggtgaatcgcagatcctggataaaatgaaaacaatcacaatgaaaaatctgaacatgaaaaccgcattacgctggtctctggcctcgatggtcctgtttgcgctctctggctgtggattaaaaggtcccctctactttcctccggcagataaagccgatgctaaaaaagtcgtggtaaccaatgacaagtccggtcagacacagtctcagggtgtttctccagaccaaaatgcggccaaaaacagtgggcaactttattaatcggcaggccacagagtaattacgtctggcgatagccaggggtcaagcggagtaagatatgcagttcgccaaaatgcacggcctgggcaacgactttatggtcgttgacgccgtcactcaaaatgtttatttctctcccgaactgatccgtcgactttccgatcgtaaccgcggcgtgggcttcgatcagctgttggtcgtcgagccgccttacgatcctgaactggactttcactaccgcatcttcaatgccgacgggagtgaagtcatgcagtgcggtaacggtgcccgctgtttcgcccgatttgtgcgcattaaagggctgaccaacaagcgcgatattcaggttagcacccagaacgggcgcatgaccctgacggtcacggaagatgagctggtgcaggtgaatatgggcgagccaatattcgaacctcagcaaattcctttccgcgcgcccaagcctgaaaaaacctatattttacgcgcagaagaacacaccgtgctctgcggtgcggtctcaatgggtaacccgcactgcgtgttacaggttgacgacgtagtcactgccagagtagaacaacttggcccgctgctcgaaagtcatgaacgttttcctgagcgcgtcaacgtcggctttatgcaggtgatcgaccgcagcagcgtcaagctgcgcgtttatgagcgtggcgctggcgagacgcaggcctgtggaagcggtgcctgtgcggcagtggcggttggaatacagcagggtttactcgctgaggaagttcaggtggaactgccgggaggcagcctcgacattcgctggaaaggtccgggtcatcccctttatatgaccggccctgccacccatgtttacgacggatttattcatctatgaacaatcttgacgatcagattgaaagcgtaaccgagctcgacgacgaactggtgatgcagtatctgctgcaaaacccggatttcttcatcagaaatgcgcgcagcgttgagcagatgcacgtgccgcatccggttaaaggcagtatttcactggttgagtggcagctcggacgccagcgcaatcagattgcccaactggaagaagaaattaccctgttgatggaacaggcaaccattaacgaaaccttgtttggccgactgattgagcttcaggccaatctggctgacgccaccagcctgcaggatatgcttaatcgtctgcaacgctggggtcgcggtcttggtcttgccggtgccaacgtgcggttgttcagcgaaagctggcgcattggtgcaccgtctgacttcactcacctggcgttgactcgcagctcgtttgagtcactgcgcatccagcgtctgggcgatactcagcacttcctcggaagcctgaacgggccggaactgttactggtgctgccgcaggccaaggcggtcggctctgtcgcactatcgctgatgggcgaagagggtgaattgggcatgctgattttcagcagccgtgacccgcagcactatcaggcgggcatgggcactgtgatgctcgaccagcttgccaaaatgttgccgggcctgctgtcgcgctggatcgaacgcgcatgagccaaactgactcgccactgctcccgcggtcgaggcatttttacgatttctgcgggttgagcgacagctcagtccgctgacgcaaagcagttatcaccaccagcttcaggcgttgatagcgatggccgacgacatcaagctgaccgactgggcgcagctcgacgctgccaaggtcagaatgttgaccgcacgcagtaagcgtgcgggtctcggtgcctccagcctcgccctgcgtctctcggcgttgcgcagttttctcgactggcaggtgcatcagggcgtccttcaggctaatcctgccaaaggcatttctactccgcgtgcgccgcgtcatttgcccaaaaacattgacgttgacgaggtaggccaactgctgaatatcgacctcaacgatccgctcgccgtgcgcgaccgtgcgatgctagaagtcatgtatggcgcgggcctgcgtttgtctgagctggtaggcatcaatctcggtcacgtcgacctgccctccggtgaaatttgggtaatgggtaaaggcagcaaggagcgcaaactgccgattggccgcacggcggtgacctggcttgaaaactggcttgccctgcgcgacctgtttgggcctgaagacgacgcgatgtttctgtctaatcagggccgtcgcatctccacccgcaacgtgcagaaacgctttgccgagtggggcgtcaagcagggcgttaacagccatattcacccccataagcttcgccactcttttgcgacacacgttctggagtcgagcggggatttgcgcgcggtacaggaactgttgggccacgccaacctttccaccacgcaaatctatacccacctcgactttcaacatttggcgtcggtttacgatgccgcgcatccccgcgctaaacgaggaaaaacctgatgaagttttaccgcccctgcagcagatcgaggcgatcaccttcgatctcgacgacaccctctacgacaactatccggtcatcgttcgcactgaatcggaaacgatgcagtttttacgccagtatcatccggcgacggcggatatcgaatcggcagagtggcgggcggtacgtgcggaactgctggagcaagatgccgaaatttatcatgatgttaccgcgtggcgacacaaggcgctgtatcacaccatgctgcgtcgcgggctgagtgaggcagaagccgaagcgggcgcagaggcgacgatgcagaacttcgcgcactggcgcagccgcatcgacgtaccgcaggaaacccacgacacgctgaccgcgttgggcaaaaaatttccgctggtggccatcaccaacggcaatgccaatcccgaccttttcggcctgtcgaagtatttcgaatttacgctggtagctggtcgcgacgggcgcgccaagccgtggagcgacatgtatcacctggcagccgaacgcctgaatgtgccgctggcgcacattcttcacgttggtgacgacctgactactgacgtcgcaggttctgtgcgctgcggcatgcaggcctgctggataaacctgcgtgaaggcaacctgatgcacattccggatgcgcgcctgctgccacatatcgagattaacacattggcgtcccttaccacgctgctgtaatctacgcaggtagccatctcgcgcaaaatactgtatataacagcagtaaacctccatgcggcgttcgagttttaatcgatttgcccgtggatgcatttctttatccagacaaacggtgcttatggacgtttctgacctgctcgacagccttaatgaaaaacaacgcgaagccgtaggcgccaagcgcagcaacttattagtgctggcgggcgcaggcagcggaaaaacgcgggttctggtgcatcgcatcgcctggctgctttccgtcgagaactgctcgccgtattccattatggctgtgacctttaccaacaaggccgcggcagaaatgcgccatcgtatcgaacagttaattggtaccagccaaggcggcatgtggatcggcaccttccacggcctcgcgcaccgcctgctgcgtgctcaccatctcgacgccaacctgccgcaggacttccagatactcgacagcgatgaccagctacgtctgctcaaacgcatcatcaaggcgctgaatatcgacgagaaacagtggccgccgcgtcaggcaatgtggtacatcaacggcaaaaaagacgaaggtctgcgtccgcagcacgtcgagagctatggtaatccggtcgaagcgacctggctgcgcatctatcaggcctaccaggaagcctgcgatcgcgctgggctggtcgatttcgccgaactgctgctgcgcgcccacgagctgtggctcaacaagccgcacatcttgcagcactaccgcgaccgctttaccaatctgatggttgacgaattccaggataccaacagcatccagtatgcctggatccgcctgctggccggtgaaaacaataacgtgatgattgtcggcgacgatgaccagtctatctacggctggcgcggcgcgcaggtcgagaacatccagcgattcctgcacgatttccccggcgcggagactatccgcctcgaacagaactatcgttccaccagtaccattctgaccgctgccaatgccctgatcgccaataacaacgggcgcatgggtaaaaatctttggaccgaagacgtcgaaggcgagccgatttcgctttactgcgccttcaacgagttggatgaatcccgctttgtggttaaccgcatcaaggcgtggcaggacaacggcggggcattgaacgactgcgccattttgtatcgcagcaacgcccagtcacgcgtgctggaagaagccctgctgcaaatggcgatgccttatcgcatctacggcggacagcgattcttcgaacgccaggagataaaagacgcactggcctatctgcgtctgatggccaaccgtaacgacgacgcggccttcgagcgcgtggtaaacaccccgacgcgtggcatcggcgacagaacgcttgatgtggtgcgccagaccgcccgcgaccgccagatgaccatgtggcaggccacgcgggtgctgttgcaagagaaagtgctggccggacgtgcggcttcagcgctgcaacgtttcaccgaactggtggatgcgctggcgcacgagaccgccgacatgccgctgcacgtgcagactgaccgcgttatcaaggattctggcctgttcatcatgtatgagcaggagaagggcgaaaaaggtcaggcgcgaatcgaaaaccttgaggaactggtgacggcaacccgccagtttagctatcaggacgaagaccaggatctgatgccgctacaggcgttcctgtctcatgcggcgctcgaagccggagaagggcaggccgacgcctatcaggacgccgttcagctgatgacgctgcactcggccaaagggctggagttcccgcaggtgtttatcgtcgggatggaagaggggatgttcccgagtcagatgtcgctcgatgagggcggtcgtcttgaggaggaacgtcgtctggcctacgttggcgtgacacgtgccatgaaaaagctgacgctgacctacgccgagacccgccgcctgtatggcaaagaggtttatcatcggccttcacgctttgtcggtgaactgccggaaaactgcgtcgaagaggtgcgtttacgcgccagcgtgacccgtcaggtgagccacaggagcatgggcacgcccgtgctgagcaataacgacagtggcttcacccttggccaacgcgtgcgtcatccgaaatttggtgaaggcactatcgttaatctcgaaggcagcggcgagcacagccgcttacagattgccttcccgggagaaggcattaaatggctggtagcggcctacgcccgtcttgaggcggtataggcctggacgggctatcagactcgccattttgagctcagttacgcgccgaactttagaacttcactgtgtccccgaccttggcggtgagataccacgccatggtcgcctgggatttgtcatcgccttcggccgggctacccgggaaggtatcttcctcaggtacgggaacgtaagggccctgcttgatctccaggaatgtcgaaccgttgtccagtgcgatggcgctatgccagacgccagcaggaatttccaacgtgcgggtttcttcgcccagcaccaaacggtcggtaatctgcccagcagaattgtaaatcaatacaacaagacgaccggtcagcgtactcaataattcccaggtatgagggtgacggtgaatgcgcacatagctctctttatccatcgtcacggccagacgttgaaccgggtcgttgacgtccggatgcaggttcaggttggtgcgtaaacgaggtgattcacttgccttggcggcaagctgggtcaggttttcacgggtgatctgcttggtcatttttttatcctgaaaggtgtgccggaaagggattacgtggtatttggtttgagactgagtgtagtcaaaaaatcccgctgtggtaagcatctcgcgcggcgatgggcggttgaaaattatgccgaaatgttgcggaattaggcgccttgccggttgacagtctttttcttatcggcgtaacatgcgcgcactattatttatgaggattttcgccttggacgcacccagtagatactggctcaacaatctgttaagcaggttccacttctaaggccatcctcattgctgatggccgcagagctggttcgaaatgtacctcgaaggtatggatttcgaacccactctaggtggttgtcagcgacctcaaaaatgtcgctgtgagtcagaccggaatcgggtctgaaatataacggtgaccttcaccctgtgtttccccgctgtgcttcaatgcgttgtccatacctgtcaccattagggagaacgggcacatgctgagtgcttttaaattagataacagccgcttatcccgtttggaactggatgaagcagagagttcgctttgcgattctctgtgggtcgatttggttgagcctgacgagctggagcgtgaacgcgtccagaatgagttagggcaaagtctggcaacccggccagaactggacgatatcgaagcgtcggcacgtttttttgaagacgaagacgggctgcacattcactcatttttctattacgaagatgccgaagaccatgcgggaaacagcaccgtagcattcaccattcgcgacgggcgcctgtacaccctgcgtgaacgtgaactgcctgcgtttcgtctttaccgcatgcgcgccagaaatcagcagcttaccgacggtaatgcctacgagttgctgctggacctgttcgaaactaaaatcgaacagctggccgacgaaatcgaaaacatctacagcgatcttgaaaagctgagccgcgtaatcatggaagggcatcagggcgacgagtacgacgccgcgctttcgacgctggccgagctggaagacattggctggaaggtacgtctgtgtctgatggatacccagcgtgcattgaacttcctggtgcgcaaggcgcgtttaccgggtgaacagctggagcaggcgcgtgaagtgctgcgtgacatcgagtccctgttgccgcacaacgaatcgctgttccagaaggtgaacttcctgatgcaggcggcgatgggttttatcaatatcgagcagaaccgcatcatcaaaatcttctcggtggtgtcggtggtgttcctgccacctacgcttgtggcgtcgagctatgggatgaacttcgagtttatgccagagttgaagctgaccttcggctacccggcggcgctggtgctgatgctgctcgcgggcctcgcgccttatctgtattttaagagaaaaaactggctgtaaaggttttgaatccccggttcgccggggaaatcccgcccatggcataccccttgtcgcgcaaaatatgttaagaatatccctcctgttgatttaacgaagactcgataaatgttgatggaaaggatggctcctgccgcccagtggtgttttcttatcgtagcgtcgctgattttaggttttatatttcagtactttaatgtgcctgctgcgctcctgcttgggccgatgattgtcggcgtcgtgatggggctgtttggcgccacggtgcgtattcccccgctgtgcttcaaaatcgcccagggcgtgattggctgcatgattgcgcaggcgctgtctccctcgattcttcctcctctattacacgactggtttttagtgctggtggtgctgatttgtactctgctggcgagcggcctttcaggctggctattggttaagttcagcaatttgccggggccgaccggcgcgtgggggtcttctcccggcggcgcgagtgcgatggtggcaatggccggtgactttggtgcggacgtgcgtctggtggcgtttatgcagtatctgcgggtgctgtttgtggctactgctgcggctttcgtggcgcgcatgagccttggggatcagatgacgggcgcggccgccgtcgagtggttcccgtctcttgacggggacttcctggttacacctgcgctggcgctggtcggtgtctggcttgcccccaagctgcgcattccctccggggcgctgctcattccggcggtggccggtgcctttctgcattcgactgggactgtgctgttacaggtgcctgaatggctgctggcgattgcctatacctttatcggctggagcgtggggctgcgctttacccgtccgatcttcaagctggcactgcgtacgctgccgcagatgatggcatcaattatcgggcttatgctgttgtgcggagcgatggcctgggtgctgacccagattctgcatgtggatatgttgacggcatatctggcgaccagcccaggcgggctggatacggtggcgattatcgcggccggaagccacgtcgatatctcgtttattatggcgatgcagacgctgcgcctgctcaccattatcgtcacggggccggcgatggcgcgctttatctcacgcagcgccaccccggtaacctcttaaccctcggctttcacaggctttaccgctaaggcgttgtcgctccgctgctggcgctgaaaacgcagtgcgtcatacacgaagaacgccagaccggcccagatgaaagcgaaagtcaacaactgggacggtttgaccgactcgccgtaaaataccaccgccagcaggaacatcagcgtcgggccgatgtactggaagaagcccagggtcgagaatttcaggcgtgaggtggcggcggtgaagaacagcagcgggatagtggtaatgatgcctgccgaggccagcagcaagttaagtgaaagcggattattggccagattgctggtcgggctgtgggcgataaagaacagatacacccccgaggcaggcagcagccacagcgtttcaatcagcatgcctgcctgcgcatcgacggcaatcttcttgcgcatcaatccgtagaacgcgaaggtcagcgaaatgctgatgccgagaatcggcaaggatccaaagacccatagctgaaccagcactcccgccagcgccagcacgaccgcgacccactgcagacggcggaagcgctcccgaggaacagcattcccagcagcacgttaaccagcgggttgatgaagtacccgaggctggcctcgaggatgtggtcgtggttaatagcccagatatacagcagccagtttgcaccgaccagcagggcgcttatcagcagcagagccacctttttcggcgtggcgaacaccttgcgcaccccattccagctgcggctaatggtcagcagcaacagcataaagaagaatgaccagataacccgatgggtcagaatctcttcggcaggaacctgtttgataagcttgaagtaagcgggcgcaatgccccagatgaagtaggcgataaaagcaaaaataacgccctgacgggtccgttcagcatccatgacaattccctgattaagtgatgtttttatccgaccagatacgttgccgtggctgtcgcgatgtgtacgtcattttcgttaactaaatctacacgcgctaccgacaccttattaccggcgcggatcagcgtgcttttgacaacaaagtgctcgccgcgaccgggacgcagatagtcaacgcgcaggtcaatggtgcccattttagagagtcgctggcgcagttcaggctcaagcagcggatggtccggtttgtcgtggcgaatcagcgagctgttgacgcaaaccaggccggctgccacgtcgagcaccgaggcaatcaccccgccatgaagaattttctgtacggcgttacccaccagtttgttttgatttttgaacgtcagctcggcgtagccgttatccaggcgctgaagttccagaccaagctcgcgattaaacggcatgtcgtaaataaaaatctcaccaattaactggcgagcggcatcgtgactcaacggcgtaacggacatgaaaatttcctgataatccatgaatgggagagtgttcgaattcacattaatttttgattttaggcatcggcatgattgatttctagcctactcatgctaatcctaaacagcttttaatttgtgtgtagaatggcctgctttttattctaaatgtatcaataaataacaactgtgccgacgagcggcagaacttttttggggtggaggaaggatgcgtaatttttgggctgttggggctgctatgttgacagcaccgttactcagctacgctgatgaagctaagattcaagatgtgcacgatgcgccgagcgtacgtggcagtattatcgccaatatgcttcaagaacacgataatccgtttacgctttatccttatgatacaaactacgttatttatacgtataccaatcatatcaacaaagaggctatccagtcctacaactgggctgacaatgccaaaaacgacgagctcaaatttcagctgagcctcgcattcccgctgtggcgcggtattgccggtgataactcggtgctgggcgcgtcttatacgcagaagtcattctggcaggtatctaacagcgccgagtcttcgccttttcgcgagaccaactatgaacctcagctgttcctcgcctgggcgacggactacgaggtccttggctggacgctgcgtgaagccgaatacggcctaaaccaccagtccaacggccgcgctgacccgacttcccgcagttggaaccgcgtgtatgcgcgcttcatggcgcagcgtggagactggcaggttgaggtcaaaccctggtaccgtattccagaaaacaaagataatgatgataatccggacataaccaagtatatgggttattaccagcttaaaatcggttacgccgtgggtgagagcgtgatcagcgtgaccagccgttacaactggaacactggctacggcggtgcagaactgggctggagttatccgattacccgccatgttcgcttctatactcagctgtttagcggctacggcgagtcattgattgactacaactacaagcagactcgcgtcggtattggtatcatgatgaacgatattatgtgaccgaccgatcggcaccagcatagctcggcactatcttcctgttacttaagaagaagtgccgagtgtcatcaaattttggggaaacgagtgtcaacggcggcagtgataaataaggagttgctggcagaacaggtattgcgcgataccttcggctatcagcaatttcgaccaggtcagcaaacgatcataaacgcagccatctccggcaaagattgcctggtggtgatgccaaccggcggcggtaagtcgctgtgttatcagattcctgcgctagtgatggacggcctgacgctggtggtgtctccgcttatctccctgatgaaagatcaggtcgatcagctgatggccgccggtgtcgaagccggatgcctgaattcaacccagacccgcgagcagcagcttgaggtgatggcgggctgccgcagcggtcgcataaaaatgctctacatcgcccctgagcgtctgaccatgggcgatttccttgagcaactgcaacagtggaacccggcgatgctggcggtcgatgaggcgcactgtatttctcagtggggccacgacttccgtcctgaatatcgcgcgctcggtcaactgaaattacgctatccacagctgccggtgattgccctgacggccaccgccgacgaagcgacccgcaacgatatcgttcgcctgcttgagctcaacgacccgctggtgcaggtcagcagctttgaccgccccaatattcgctacaccttggtcgagaagtttaaacctctggatcagcttttacgctttgtgcaggaccagcgcggtaaaagcggcatcatttactgcggcagccgtgccaaggtagaagacaccgccgcgcgtctgcaaagtcgcggtatcagcgtgggcgcttaccacgccggactggacaatgaacgccgttcccaggttcaggaagccttccagcgcgatgacgtgcaaatcgtggtcgcgaccgtggcctttggcatgggcatcaacaaacccaacgtgcgttttgtggtgcattttgatatcccgcgcaatatcgagtcttattaccaggaaacgggtcgtgcaggacgtgacggcctgcccgccgaggcgctactgctttacgatccggccgatatggcgtggctgcgccgctgtcttgatgaaaaaccggcggggccgcagcaggacgttgaacgccacaagctcaacgcgatgggcgcttttgccgaggcgcagacctgtcgtcgtttggtcctgctgaactactttggtgagggcaaacaggaggcctgcggcaactgtgacatctgcctcgacccacccaaacgctatgacgggctgatggacgcccagaaggcattgtcctgcgtttatcgcgtcggccaacgcttcggtctgggctatatcgtcgaggtgctgcgtggcgcgaacaatcagcgtatccgcgaatacgggcacgacaagctgcctatctacggcatgggccgtgaacaaagcaacgagcactggataagcgtggtgcgccagcttattcatctgggactgattacccagaatatcgctatgcactccgcgctacagcttaccgaggccgcaagaccggtgctgcgcggtgaggtcgagatgcagctggcggtgccgcgtctgcaaacgctgaagattcgcggcagcaatactcagaaaacctatggcggcaactatgaccgcaaactgtttgccaaactacgtaagctgcgtaagtcattggcggatgaaggaaacgttccgccttacgtggtatttaacgacacttcgctgctggagatggcggaacagctgccggtcagtccgggagaaatgctgggcattaccggcgtcggccagcgcaagcttgagaaatttgggcgtccatttatggcgttgatccgcgatcacatcgataacgacgacgaatgagtacaatggccagcctgttaagagtcgaatgagtcagtgtcaaaaagggagcagtaaaaatgataattctgtttttaaccgtcgccgccgtgcatcttgttgcattgatgtcaccgggaccggactttttcttcgtttcccagactgccatgagccgctctcgccgtgaggcgatgatggccgtgttgggtattacgcttggcgtgatggtctgggccgcggtagccttgatgggcctgcatctgctgctggagaaaatggcctggctgcaccagattattaccgtcggcggtggcctgtatctttgctggatgggctggcaactgctgaaatcagcgcgtgctaaaaaggccgccggcactttggcctctgagagccaaccggtgaaacttcctgcgcggggcaaaacctttatgcgcggtttgctgaccaatctttccaacccgaaggcagttatctatttcggcagtatcttctcactctttgtaggtgacagcgttggcagcggcgagcgttggggcctgtttgccttgatctgcattgagacactggcatggttcaccgtggtgaccatggtcttcgcgctgccggtgatgcgccgtggctaccaacgtctggccaaatggattgacggcgtggctggcgtactgtttgccggtatcggcatccacctgattatttctcgttaacgcagggtcgtattcataaaaaaagggcgtgcctcaataggacgcccttttttttgaagcattcgcggtcagattttacgcgccgtcgccaacagcaggccgaccatcataaacagcgagccgaagatgcggttcagcagcgtcatctgtttcggtgcttttatccagccggcgatgcgttttgccagcgtggcatagccaatcattacgataatatcgaccaccacggtcgtcacccccagcaccagatactgcgcgacctgcggctggtggggaattataaactgcgggaacagcgcggcaagaaacacgatgcttttcgggttggtcaggttaaccagcaccgcgcgtttaaacagcttgtggcgcggcatgctgctcgccagcgcgttcatgttgatagcgcccgaggtacgccactggcagataccgagccagatgagataggccgctccgcaccattttaaaatctcgaacgccaacagcgactgagacaccagtgcgccaaggccgatgccgaccagcacgatatggatcgataggcctgtttgcagcccggcgatggacgccactgcaccgcgatagccatggctgatgcctgtactcatggtattgattgcgccagaccccggcgacaggcttaaaattgaagtcgtgagcagataagtcagccaccagtccaatgtcattgtcgttctcctttgatgctgaccgtgcagcttgaaatctattgagatgcgtctttttgtggcacaatacgctattgtttaaaattgcgctacagcccgaaaacaacataatttctccacgctttatttttgccctgggacagtcgatgtcatcaaattacgatcggtggttaacgcgtgaatacggcttttcggcctttgcgatgggtccgctgctggacttctggcgtaccagaattgaaggcgaatttatcggggtcgataacgtcccgatccgctatgtccgtttttgttcccccagtcatgataaagtcatatttgtgtcaacgggacgtgtcgaaagctacgtaaaatatcccgagctggcctacgatctgtttcactgcggctatgacgtgatgattgtcgatcatcgcgggcaggggcgttcaggccgactgctgaaagacccgcatcgtgggcacgtgcagaacttcgatgattacgtgaaagacctgtcgaccttttacaagctcgagattgcgccacgcaattacgccaaaaagtttgcgctggcgcattcgatgggcggggcgattcttgcgctgttcctggcgcgggagccgaaaaactttgacgccgcggtgctgtgtgcgccgatgaccggtatttacctgcgcatgccgagctggctgacacgaaaaatccttaacttagccgaacgccgaccgatgtatcgcgatggctacgccatgggtaccggcagctggcggcctctgccgtttgtggtcaatcggctgacccacagccgcgagcgctatcgccgtaaccagcgtttttactctgattatcctgagttacgggtaggtggaccaacctaccactgggtgcgtgaaagtattcaggccggtatgcagattctgcaggaagccaaaaaaatcaccaccccggtgctgttattgcaggcgagtgaggatcacgttgtcgataaccgatcccacaccgctttttgtcaggccatggccgttgccgggcatccttgtgaagggggtaaaccgctggtcatcgaaggcgcacgccatgagatcctgtttgagcgggacgctatgcgggcaaaggcgctagacgccaccatgcgctttttcgcgcgcaagacgtaaaccgcggctcgccgcgcacaactccatcagaggttagaacctaacgctatgtatcatgttgttgcttccgatttagatggcacactgctgtcacccgatcataccctgagccctttcgccaaagagaccctgcagctgttgacccagcgtgacattcactttgtttttgccaccggacgccaccatatcgacgttgcgcagatgcgtgataatctggggatcagtgcctacatgataacctccaacggcgcacgagtgcacaacaccgaaggcgagctgattttcagccataatctggcacctgacatcgccgaagacctgttcgcgattgcgcacgacaacccagacattctgaccaatgtttatcgcaacgatcactggttcatgaaccgcgatcgtcgcgatcaggaggacttcttcaaggagtcgattttcaaataccaactctatcaaccgggtctgcttgagaccgacggtatcgccaaggtctatttcacctgtgacgatcacgagaagctgatcccgctcgaagaggcgatcattgcacgctggggcgaccgcgttaatgtaagtttctcgctgccggtctgtctggaagtgatggccggtggggtgtcgaaagggcacgcgcttgaagaggtctcaaaactgatgggctatacgttgaaagactgtatcgcgtttggtgacggtatgaacgaccttgagatgttaaacatgtcaggcaaaggctgtctgatgagcggttcattgccgcgtctgaaggccgcaatgcctgaggctgaaatcattggttctaacgccgacgatgccgttccccactatttgcgcagaatgtatctgaataacgaccgctaacgcgtactgtcagaagcatcaagggccgcccgttgtaaaacgggcggcccttttgctgaaaattcctgaccggctttaactcatgccgcctggtgttttctcactgagcaggggcaagacacgcgaaagagggccttggacgtgttgataactctttactgcaccttcagcgtagcgataatcgcttcggcgtcggtctgggcctgctgctggttgtcagctggcatcgtaatttgcatggtcatcagctggttatcgatcttcgccagcacgatagacgaatacgctttctgacccgcagcgttgatcacgctgtcgtactgctgcaaggtctgcccgttaacctgaatggacttgttggtaaccacttgcagattggtgtcgcggtcgcgttgctgctgttccagacggtttgccacaacttccagagagtccggcgttgagtcacccagaatgacgatcaccgctttctgcccggttttatccgcgtaaacgtgcatattgttggcctgagtgccgagcttgccgctctggtcgctcattccctgcggcagtgagaacgccagtttgccgttaagcaggcttacctgttgcgttgtcgtcgccgctgccggcgtagcccctttgtctgccgaagcagttttatcgtcggttttgccatcgcaagctgccaaaccggcaaccagcagtgttattcccataaacttggctaatttgtgcatagggcttcctttaagtttcacgcactctacacccaacgggaccgccaacgtgcggaacgcggttaggtaattgacttcacggcctttatggcaacctattcaaggccgaaaagcaagtcagatattggcggcttttgtgtcgtcgttaaacgctacagcatcgcttttacctgaatgagccaggcgcttaagcaggacgttcagcagcataccgtacatcggcaggaagaaaatcagacaaatgagcaatttaaagctgtagtccaccagcgcaatctcgacccagtgctgcgccatgaaggcatcgctacttttatagaacgcaataaagaagaaggccagcgtgtcgctaatattgcccaaaaacattgctgccgtcggtgccacccaccagctgttacgctggcgaagacggttaaacacctgtacatcaaggatttggccgagtacgtaggccataaagctggcggttgcgatgcgggcaaccatcacgttcaggctgctgagcgacgcaaatccctgccaactgccctgataaaagagcgcggagatgaaataggagataaccaaagcgggcaccatcaccgacaaaatgatccgtcgcgccagcggtgcaccaaagatgcgtaccgttaaatcagtggcgaggaaaataaacggaaaggtaaacgcgccccaggtggtggtaaaaccaaagatcgatacgggtaattgcaccagatagttactggaggtaatgatggcgatatggaaaagcgaaagccataccaacgcggaaaaccgctgttgagctgtaaacgaatacataaattgtgacctttttagtgtttggggtgagggaacccaataacttcattagacgtaaagcgtaaattttgcactgaaaacggtgattttactaccgcggcgcgcatactatacgtttgcgcaacaaaaggctatcaccattgaagcatcaactgcgccttgctcagattaatttgcggggtaaactgtcgcggcttaaggtgttgcccgtaaaatgggctgaaaagaactgaaagagagtaaaaatgagcgatgtatttaacgatgccgaccaccaactggacgcactgggcctgcgctgccctgagccagtcatgatgatccgtaaaaccgtgcgtaagatgaatgacggtgaaacgctgctgatcctggctgacgatccggctaccactcgtgatattccgggcttttgccgtttcatggaacatcagctgctggcgtcagataccgaacatctgccttaccgttacctgctaaaaaaaggcacgggcgcataattacgccagtgccctttattatcgacaagcctttccgcctgattattttatgattttttcctgagcaggcgcagcgcgttggcggtgaccaacgctgtagcgcccgagtctgccagcacggcaagccagaggcccgtcagaccaagcagcgttgttaccaggaacacggccttcaggccaagggcgatagagatgttctgacgaatgttggctcgcgtcgcccgcgaaaggcgaatcatctgcgccagaccgctcaggcgattgtgcgtcagcgcggcgtctgccgtttccaacgccacatcggttccgctgcccatcgcaatgccaatccgtgccgctttcatcgcaggcgcatcattaatcccgtcaccgaccatcgccgtcactcgctgctgacttagctgcgtcacagcctgtaccttatcggcgggcagcaacccagccttgaactcgatacccagtcttgcggcgatactttgcgccgcaagcgggttgtcaccggtcagcatcaccgtttcaatacccaggcttttcagttcggccagtgcgctaatggcgtcgtcgcgcagcttgtcccgcatcgccagcaggccgagcgcgcgagtatcttccaacaccaccaccaccgttttaccggcggactccagcgcggtaatttgcgcaacgacggcgggagacaacgtcgactccgagagagacttaggcgctgaaaccagaatgcgtttgccgtctatccaaccctcaaccccgatacctgcaagtgcacggcggcgttcggcggagggcggattaacgtcgggagcggctgccagaattgccttcgccaacgggtgatgcgagccgacctcaaccgaggcggctagcattagcagttgttcttgcgcaatatcggccagtgtaatcacgtcggtgacctcgggttttccttcggtcagcgtaccggtcttgtccagcgcgatagtttctaccaacgctagctgttcgagcgcggcgccgccttttatcagcgcaccctgacgagtggccgcggcgagacccgaggtgatcgcggcgggcgtggagataaccagcgcacaaggacagccaatcaacagcagcgtcagaccacggtaaatccaggtttcccatggcaggcccatcgccagcggtggaataaggattaccagcagtgccatgagcataatgaccggcgtgtagtagcggctgaagctatcgaggaagcgctcgattggcgcacggcgttcttccgcctcttcaatcagttgaaggatgcggtcaatcgcgcttcggcctggcgcagaggcaacgcgcagttgcgcaacgttgtcgacgcacaggctgcccgctggaattttctcatccggtaggcgttcgaccggcatcgattcaccggttaacgcactttcatcgaagctggcggcggcctgcatcagcacggcatccaccggcaggcggcttccgggggcaacctcgataatatcgcctggacgcagactggcgaccgatactgtttgcatgccgtcagccactttcttacgggcgttctcggggatgagtgccattaaggattttaccccgcttcgtgcgcggctggcggcaaaggcttcgagtttctctccgaccataaacagcagcagaaccattgccgcttcggcggtggcaccaatgaacaacgcgccgatggcggcaatactcatcagcgtttcgatagcaaatggcgttccgctgcgcgtctggcgaattgcctgacgtagcactggccacaggccgaccagcgtggtggcggtaaaggcgattttcccccattgaggagagagttgtgccagtgctgtgctgagcagcatcaggataatcagcgtaatcagaggggcatattctttcaggcgggaaggggaatcctgagttatctctgattttctcagggtgaagccagcggcctcaacggcctgagccacctgtgaggaaaaactttccgcagagacgctttgcgccgcatcaacgaccagcttttcggtggcgaacaacactttggcatggcttacgttggccaggccactgaccgcgttctctattttacgggcgcagctcgggcaatccataccggacaccagccagctataacgctgggtgccaggcagggctgcgcccagattgccgggaccttcttcgtccccgcttccgccgtcgtctgtatcactgctacagcatccgtcttgagtatgtgagtgcccactgggttggctggtgctgcagcatgacgccgccgctagcggggcagattcactgcaacatcctgccggatgtgggtctgcatgcttgattttgctgatttttttgaacgttgttgcgtgaggcgcagaggagcggcagttcgcgccacagcttgaagagtgttgatgctgttgtgttgacatattacctcccaaagagcgttgttgagctctgatttcaggagtgtacaccctggagttaactccagggtcaagcgtgaagtgacgaatttatctgcgattacaaatacagcgaccggactatcaggaagtgtccgccgaaataacaggcggcgacaatagcgtcggcggcgcggaatttaaaacggtagtggctcagcagccaaacaatgttggcgaccagtagcaggatggagccgcagagcagcgagaaggccaaatcggtgctgcgatagaagtactgctcgccggcgacccacaccatcagtagcgtcatggcgataaacgttatcaccgcccagcgcatttcctccagtcggctccagataatcgccagcagaaccgcaccgaccaccaccagtacggcaggcagtggccagaagaaggtaaaactcatctgactggcgaagctcagggtataaagcaggtgtgacaggaagaatgccccgatggcgtacaggtaacgctctcgtggcaggagcagcaacgcatcggcaaccagcgtcgcgagcaggccaagcacaatcagatatccattggtgcctatcaccggcgcttgccaggccaataacagcagaagcagcagagtaacaggtttaaacacccatccctgccagcgtggaccgcgatagcgggcgtcgacataaagccaacctgaaaggaatacagcaataaacggccaactcattgtttatccttatttagaaaaagtaagcaaagcgctgccaaaacgatgaagccattccggcttcgccacatactttcagtgtaggagaggcggagggggccgacaatcttaaaaagggcttaaaattggagcgaagaggttagcaaaggtgttcagcgaggtttgtttaaccttggtatagccaatagcaccgcgcaacggggtgcgcggtgctgaaaggtgggattacttcttcggtagcggtggctgcttcttctgccaggccagcagttcgaacacgccgaacaggaagatgcgcagctccagccagccgccaatcttcggctgatctttagcctgcgtggctttgagtagcatcacttgaataccgtgcatgaagaacatgaacaccatcgctacgtcgaggaagtatctcatcggcttagggaacggatgcacaatgttcgacagtaaaaaaatccagatgcaaagcatcaacaaacgacccaaattaatcaacatctgactgctcctgtggcgaggcgtccgcgtcaggcgtgacgtcgcgatgatataagcgataggcaacctgcccggcaattttttcccggtgtaagcgccaacctgcgggcacgttaagggcaccatgttctacttctgtttcaacataaatccaggcttcgtcggctagccaatccttggcatctaggagtcccagggtgtcttgcaggatgcctttacgaaacggcggatcgagaaagaccacgtcatgtggggtaccgcttttggccagccagctcagggtattgacgttaatcacccggccattgtgtgcattgagtaacgccagattacgctccaactgctgcgcgatcggtttctcgaactccagcaaggtggcactgccggcatagcgcgacagcgcttcgattcccagtgcgccgctgcctgcgaagcagtccaggcatcgcgccccctgaattaccggagccagccagttgaataaagtttctctgacgcgatcggtggtcggtcgcagtcctgggctgtgaggcaccggcagcttgcgtccacgccattgaccgccaatcaggcggatttggcctgcagctggggtttgcggtttctttgccatagtattttgattgtaaattctggttgtaaaaatgtctgcacggccgtgaggaacacggtttggagggctattctaccggtgtgaagcccccgaggctaccgccgtgtcgcggttatcacggcatactgccgcgtagttgattgtatgagcagtgaattcatcacacaggcgtgttgcgtttaagggaaagtgatagactgctaggttattaccctattgataatccgttcgtcgggaattaacggcgtggagtgaagttgtaaaatggcaaaagagaaaaaacgcggttttctttcctggtttggacgtggtcgcaaggaagaagaacagccgcaggaagtagaaaaggttgagcaacccgttgagccggtagataggaccgacgccgaagcgcccgccgtttctgccgaacatcacgaagagcagcacgagcaggctgcggcagaggtgcattccggtgacggggacacggctgaggtcgtggaagccagtctggaagatgagccgcatgaaagcgtgactaaaactgcgcacgcagagcctgaagttgtcgagcaggcggtgcacgctgagcctgtcattaccgagcacgtggttgaagccgagccggtaaaacagcctgagcaggcgtccgttgaactggcgcacgaaatcgtcgacctgaccgaacaggtggctgccgcagacgctcagccggaaactgtttcagagccagagccagagccagagccagagccagaagttgccgctgttgaagagccgccattaccggttgcgcttgagccgttggtcacgctgcccgctggcgaagtcacagcgaccgagcaggaacgcccgaccaaagaaggcttcttcgcccgtcttaaacgcagcctgattaaaaccaagcagaatctgggatcgggtttcattggcctgttccgcggtaaaaaaatcgatgacgacctgttcgacgaactcgaagaacaactgttgattgccgacgtcggtgttgaaaccacgcgcaaaatcattacttcactgaccgaacacgccagccgcaagcagttgaaagacgcggaagcgctgtacggtaagctgaaggaagaaatgtccgaaattttagctaaagttgataagccactggatgtaagcggcaaaacgccgtacgtcattcttatggttggcgttaacggcgttggtaagacaaccaccatcggtaagctggctcgtcagttcgaggctgaaggaaagtcggtgatgctggcagcgggggacaccttccgtgccgcagccgttgaacagcttcaggtctggggacagcgcaacaatattccggtcatcgcccagcacaccggcgctgattctgcttccgttattttcgatgcaatccaggcggccaagtcgcgcaaagtcgacgtgttgatcgccgataccgccgggcgtttgcagaataaatctcatttgatggaagaacttaagaagattgtccgcgtcatgaaaaaactggacgaggacgcccctcatgaggttatgctgacgctggatgccagcacggggcagaacgcggtcagtcaggcaaaactgtttaatgaagcagtcggcctgaccggaattacgctgaccaagctcgacggtacggccaaaggcggcgttatctttgctatcgccgaccagtttgaaatccctatccgttacattggggtgggtgaaggtatcgaagatttaaggccgtttaaggctgacgattttattgaggcactttttgcccgagaggattaatacggatgattcgctttgaacaggtcagtaaagcttatctaggcgggcgacaggcgctgcaaggcgtcgatttccatattcggcagggtgagatggcgtttttgaccggccactctggcgccggtaaaagtacgctgctgaagttgatttgcgggattgagcgcccgagtgccggccatattttgtttggcggccacgacatcagtcggctgaagagccgcgaggtgccgttcctgcgccgtcagataggtatgatcttccaggatcaccatctgctgctcgaccggaccgtttacgacaacgttgccatgccgctgattattgccggtgccagcggtgaagatattcgccgtcgcgtatcggccgcgctcgacaaagtcgggctgttggataaggcaaaaaatttccctattcaactttccggtggtgagcagcagcgtgtcggcatcgcgcgtgccgtggtgaataaacccgccgtgctgttggccgatgaaccgacgggtaacctggatgaagcgttgtcggaggggattttgcggttgtttgaagaatttaaccgtgttggcgtcaccgttcttatggcgacccacgacatggggctgattgccagccgtcgttaccgtacgctgaccctgagtcagggcagaatggccggaggcgcttactatggcgaatagcccaaagccggtcagaaagccaaaaagcacgccagagtcaaagagcaaggcgctgcaaggcgggttccgagagcagtggcgctatgcgtggagcaacaccgttcgcgacatgctgcgccagccgttggcgacgctgctgactatcatggtcattgccatttcgctgaccctgccgagcgtttgctatctggtttggaaaaacgtcagtcaggccgctgaacaatggtatccgacgccgcagctgaccgtttacatcgataaatcgctggacgacgacgcggccatgaacgtggtgaaagcgctgaaggccgaagcgggcgtagataaggtcaactatctgtctcgtgaagaagcgatgggcgagttccgtaactggtctggctttggcggtgcaatggatatgctcgagcagaatccgttgccggcggtggcgattatcacgccaaaaatgaatttccaggattccaagacgttgaataccctgcgtgaccgcgtcgccgctgttcagggcgttgacgaagtgcgcatggacgacagctggtttgcaaggctggccgcattgaccgggctggtggggcagatagccgcgatgattggtatcctgatggtgattgccgtgttcctggtcatcggcaacagcgtgcgtctcagcatctttagccgccgcgataccatcaacgtgatgaagctaatcggcgccaccgatggctttatcctgcggcctttcctcaacggggggcgttgcttgggtttagtggcgcactgctttcactcatcctgtcggaagcgctggtgctgcgtcttgaagcggttgtggcccaggtggcctcggtgttcggtacgacctttgacctgcacggccttggctgggacgaaagcctgttgttattgttgatctcggcgatgatcggctgggtagccgcgtatttggcgactgttcaacatttacgacgatttacaccacaataagaatctttttggtatactcttcccttgtagctgcgggttgtgctgcaagggaagatccccatattaatagtctgctccaaaggatccttgtaatttagggtcttatattcatcttccccgttaagcacaatttcccaatcatttcccctgtacctcgcataaagtcattgggctgagaaggcgctaatgaatgaactttgagcgagaatcagggtcaaatcagcagcaaatgtgagtggttctgcgttgtactgaaatccgtggtattcagtccacggcaacgttgtgtaaaaccttcttacgtcacattagagaggctttaatgaccaaagaaatgcaaactttagcattagtaccccaaggtagcctggaagcctatgttcgggccgccaatgcctatcctatgcttaccgcagaggaagaaagggcactggctgaacggctgcattacgagggcgatctggacgcagctaaacagctaatcctgtctcacctgcggtttgtcgctcatatcgctcgtaattattcaggctatggtctgcctcaggctgaccttatccaggaaggtaatatcggcctgatgaaagcggttcgccgttttaatccggaagtcggcgtacgtctggtttccttcgccgtgcactggatcaaagcagagatccatgagtacgtgctgcgtaactggcgtattgtgaaagtcgcgaccactaaagcacagcgtaagctgttctttaacctgcgcaaaaacaaacagcgtttgggttggttcagccatgaagaagttgaacacgttgcccgcgaactgggcgtgaccagcaaagacgtgctggagatggaatcccgcatggcggcacaggacatgacctttgaccctacgccggacgaagagccgcgtgatggtcaggcgatggctcctatgctgtacctgcaggataagagctccgacttcgccgagagcatcgaagaagacaactgggaatccagtgcagccgacaagctgaccttcgcgatggaaggcctcgacgaacgtagccaggacatcatccgcgcgcgctggctcgacgatgataacaagtcaacgctgcaggaactggccgataaatacggtgtatctgccgagcgtgttcgtcagcttgaaaagaatgcgatgaagaaactgcgcatggctatcgaagcctgatgcagcaaaactaaacgcctgcccgttgagtcaggcgttaggctaaaaggcgaccatcacggtcgctttttttatgcctgtaatttatgccagttgccgttatggagcgtaaaaccacaggcctgcataaaggccgccagcaccgggtcgtttgactcggcctgcatcgacagcgccgtaatagccggcagctgtgcctgtaaatcctcaagaagatacagccctacgccgcgacgtcgcgtgacttcacgcacgcacagatcgctgagttccgcctgagtctccacaaccgagaccttaacggctcccagcagtcgtgcgttgaaacgagcagcaaaaatcatacgttgttcattcatccagcgctgccagtcggcgggctgctgctgcggccagatcttggccaaatcgatttcatcttgcgcagtaagctggtcgagtttttctatggttaatttcatgatgaggcacagataacaaaggaaaaaggactgaaacagtttaccggataaccccaacatcgtggcgtaactttttttgaacaataacaggtcgaaaatattttcactgctgtcgtattaaatataaacggcgggatacgttttattaagcagttttaaccgctggcacccttccattttgccgcatttttacccctataaaattctgattacacctcatgtttctggatgtgtgatttgatttgcagaagaaaatacctgtttaataacgtgataaataagcgttttattagataataagaccaataaaagccgctaactcattattacttatggcgaaaaccctgggtgagcatgttttaagcaggtggcgggacaacatcacaacataatcaaatggggtagtcaggatgaaattagcaaagggtaagacgtggttggcagcctgtgtggcgttggcaatgagccactcggccatggcgcaggacattaaggtcgccattgttggtgcaatgtcaggaccggtcgcccagtacggcgatatggaatttaccggcgccaaacaggcgattgcggatattaatgccaaaggcggcattaaaggcaataagctggttggcgtggagtacgacgatgcctgtgacccgaaacaggcggttgcggtcgcaaacaaagtgatcaatgacggcattcgttatgtcatcggtcatctctgctcttcttcgactcagcctgcttctgacatttatgaagacgaaggcgtcatcatgatcacgccagcggccaccaacgccgacctgaccacgcgtggctacaagatgatcctgcgcaccaccggtctcgattccgatcaggggcctaccgccgctaaatacattctgaataccatcaagccacagcgtatcgcggtggttcatgacaaacagcagtacggtgaagggctggcgcgctcggttcaggacagcctgaagaaagccggtggcaacgtggtgatgtttgaaggcatcaccgccggagacaaagatttctctacgctggtggcacgccttaagaaagagaacgtcgatttcgtctacttcggtggttattacccagagatggggcagatcctgcgccagtcaaaacaggcaggtctgaacgcacgctttatggggcctgaaggcgtcggtaactcttcactctccaacatcgccggtgctgcctctgaagggatgttggtaacactgccgaaacgctacgatcaggtgcccgccaaccagcctatcgttgactctctgaaagccaagaagctcgacccgaccgggccttttgtctggaccacttatgccgccctgcagtcgctgaccaccggcatgacccgcagcggcagcatggaacccgcggatatcgtcaaaaatctcaagtcggcaccggttgataccgtgatggggccgttgagctgggacgagaagggcgacctgaaaggcttcgagtttggcgtatttgaatggcatgccgacggcacctctacgccggttaagtaatattttaagcctctcccgtcttagcctttgaagccgcgcccgcgaaagccgtcgcggcttcaggcctccaggcgaaagcaatctaaggtgtagagtatgtctgagcagtttctctattttattcagcagatgtttaacggcgtgaccttaggtagcacctacgcgctgatagccatcggctataccatggtttatggcatcatcggcatgattaacttcgcccacggcgaggtgtacatgattggcagctacgtctcgtttatcgtcatcgcagcactgatgatgatgggtatcgacgccagctggctgctgataggtgcagggtttattgccgccatcgtgatttccagcgcctacggctggagtatcgagcgcgtggcctataaaccggtgcgtaattccaagcgcttgattgccctaatctccgcgatcggtatgtctattttcctgcaaaactacgtcagcctgactcagggctcgcgcgacctggcgttgccgagtctggtgaccggccaatggaagcttggcgaggctaacggctttgccgcgaccattagcaccatgcagctgattatctgggggtgacctttatcgcgatgctggccctgacgctgtttatccgctattcccgcatggggcgcgcctgtcgcgcctgtgccgaagacctcaagatggcgagcctgttggggataagcaccgatcgcgtcatttcattgaccttcgtgattggcgcactgatggcagcggtcgcaggcgtattgctcggccagttctatggcgtgattaacccatatatcggtttcatggccggaatgaaggcctttaccgctgccgtcctgggcggtatcggtagcattccgggcgcgatgataggtggactgatcctcggtgtggccgaagcactgacctccgcttatctgagcactgagtacaaagacgtggtctccttcgcgctgttgattgtcgtgctgctggtgctgccgaccgggattctgggccgcccggaggtcgagaaggtatgaaacatctcaatctgctcaatgcgctgatttcggcgctggtgttgctggtgctggcctcttttattatggggctgcaactgagccttgagggcaccagactggtagtgcacggtgccgacgtggtgcgctggtactggattgcggccggctgtgcggtggtgttcgtcttccagctgtttcgcccactgctgcaaaaaggactgaaaaaggtctccggccccagttttgttctgccgagctttgacggttcgacgccgaagcagaaatggctggcgctgctgctgattattgccgccgtggcctggccgtttatcgtttcgcgcggcaccgtggacatcgccaccctaacccttatctacatcatgctaggcctcgggctgaacgtggtcgtcggactgtcggggttattggtgctgggttacggtgggttttacgccatcggtgcttacacctatgcgttgctgaaccattactacggcatcggtttctgggaggcgctgccgctggcaggtttggtttcggcagcctttggttttctgctcggctttccggtcttgcgcctgcgcggcgattatctggcgattgtcacccttgggtttggtgagatagtgcgtattctgctgcttaataataccgatatcaccggcggtccgaacggcatcagccagatcccgaaacccacactctttggactcgaatttagccgcacggcgcgcgagggcggttgggacacctttagccatttcttcggcctgcgttatgaccccagcgatcgcatcatttttctctatctggtcgccttgctgctggttatcttgacgctgttcatcatcaaccgtttgctgcggatgccgctggggcgtgcgtgggaggctctgcgtgaagacgaaattgcctgccgttcgctcggcctcaatccgacccgcatcaagctgactgccttcactatcagcgccgcctttgccggattcgccgggacgttatttgccgcgcggcagggctttgtcagccctgaatcctttaccttcgtcgagtcggccttcgtgttggccatcgtggtactgggcggcatgggttcgcagtttgcggtgatcctcgcggcaattctgctggtggtatcgcgtgagctgatgcgtgacctcaacgaatacagcatgctgctgctcggcgcgctgatggttttaatgatgatttggcgtcctcaggggctgctgccgatgaaacgtccacagctcaaactgaaagtgctggataaaggcgagagcggcaaaggagagcaggcatgagtccccaacctttactgaacgttgaaggtctgtcgatgcgttttggcgggctgctggcggttaacaacgtcggattacagctcaatcagggagaaatcgtctcgctgattggtccgaacggtgcgggtaaaaccacggtattcaactgtctgaccggattttatcgcccaagcggtggcagcatcaaactacgcgacaggcacattgaaggcctgccggggcataagattgcccgtctcggcgtggtgcgtactttccagcacgtgcggttattccgcgagatgacggtgattgaaaacctgcttgtggctcagcatcagcacctcaaaagtggcgccctcgcgggtctcctgaaaacccctggctttcgtcgcgccgaggcggaggcgctggaccgcgcggccgactggcttgagcgcgtcggtctgcgtgacttagccaaccggcaggcgggaatctggcctatggccagcagcgccgccttgaaatcgtgcgctgcatggtgactcgcccagagatcctgatgctcgacgagcccgctgcgggtctgaatcctcgagaaacggaggcgctgaaccagctgatcgccgaactgcggagtcagcatcaggtttcggtgttgctgattgaacacgacatgaaactggtgatggggatttcagaccgcatctacgtggtgaatcagggaacgccgctggcacaaggtacgccgcaggaaatccgcaacaatccagacgttattcgtgcgtatttgggcgagggataagagatgttgtcatttaatcaggtttcgacccactacggtaaaatccaggcgttgcatcaggtgagcctgcacatcagcgccggggaaatcgtcacgctgattggcgcaaacggtgcgggtaaaactacgctactcggttcgctatgcggtgaaccacgggcctcgcagggttccattgtgtttgagggacaggatattacccaatggccgacggcgcggatcatgcgcggtgatattgccattgtgccggaagggcgacgggttttttcacgcatgacggtggaagagaatctggcgatgggcggtttctttgccgcacgcgaccagtatcagcagcggctggagcgggtatttacgctttttccacggctgaaagagcgccgtgcacagcgctcgggaaccctgtcaggcggcgaacagcagatgctggctattgggcgggcactgatgagccagccgcgcctgctgctgctcgacgaaccctcgctcggcctcgcgcctatcatcattcagcagattttcgacaccatccagcagctgcgtgaagagggatgaccatcttccttgtcgagcaaaatgccaatcaggccttgaagctggcggaccggggctacgtgctggaaaacggtcatgtcgtgctggaagataccggccgagccctgttggccaatgaggcggtgcgcgccgcctatctcggtgcgtgataaagatcgttgattcaataaaaatctgtgttaaatctaataaaccgcacggcaagcgctttgcggtttttcttttatctataaattaactttgcgtacattcttataaatctttgcacaccactcaggaacattaaatgaacacagaaggtttgctcgccgcccgtatggtcaggctcaagagttcggctatccgggaattgctgaagcacagcaagatggagggcgttatttcgctggcgggaggcattccttcttcagcattattcgattttgaaggcttggcgaaggccactcaaattgcgattaccgagcagccagagcatgcgttccagtatggtctgaccgaaggcagccatggcctgcgctcacgtattgccgacctgtgcaaagatcgcggcattgtggcgaccgccgaagatatcgttgtgaccgccggttctcagcaagcgctggacctggtgatgcgtgcggttgtcgatcctgaagacgtgttcgtggttgagcgtcctacctatctggcggcattgcaaacgttggagcttgctgaagctcatctgctgtctgtgggttccgacggcgacggcatgaaggtcgacgagctggcagagattcttaagacacgcaagatcaagggcgtgtatctggtgccaacatttggtaacccgagtggcgtaacgctgagcctttcacgccgtgagcagctggtgaaactggcagccgagcatcagttcctgattgttgaagatgacccctacggtgaactgcgctttaccgacgaacgtttgccgaccctgttcgagatttctaaaacgcagtacggccatgccaacaacatcatctatacctcgacgttctccaagattctggcacccggcctgcgtctgggctgggtcattatgccgcagtggctgctgaacaaagtcgcgattattaaacaggcggcagatctgcacgccagctcactgtcgcagaccgtggccgaaaactacctggcgctgggtcgtctggataaacaaatcgaaaccatccgtgccgcctacaagcagaaatataacgtgctggccgagctgctggaacgtgaattgggccacgtgttgacctttgaatatccgaaaggcggcatgttcctgtgggctcgtttccgtgaaccgcgtaactgcaccgagtggatgaagaaaacgctggagcagggcgtcgtgttcgtgccgggagagttcttcttctccgataatccggactactcgaccttccgtatctccttcgcgaccgccactgaagagcagctgcacgaggccgttgcccgtctgaagcgcgcgctgtaagtgataaaatcagagtaaatcgaggcgcattgttcacacaatgcgcctctttttttgccatcttcccgtcatcttcgtttcaccctgctgtcacgttattgtcatttattggttatttttctgtcatttatgcatgtcatgttagctcccgaataaaaaagtttattaacttccattatttctctgcaatttctaacaccagcagattttcaggagacaggcatgtttatcaatttaaaaaaatcggctctgggtgcagcactcatgctggctttcagtgccaacgcgctagccgtgacggagatccctttctggcactcaatggatggcgagttaggtaaagaagttaactctctggccgatcgttttaaccagacgcatcctgacgtaaaaattgttcctgtttacaagggcaaatacgaccagaacctggctgctggcatcgcggcttaccgtaccggtaatgccccggcgattttgcaggtttacgaagtaggtacggcgaccatgatggcgagcaaggccatcaaaccggtttaccaggtctttgcagacgcgggtctgaaagaagacgtctcccagttcgtgccgacggtttccggttactactctgattctcagggacgcctgctttcgcagccgttcaacagctccacgccggtgctgtactacaacaaagatgccttcaagaaggccggtcttaatcccgaccagccgccaaaaacctggcaggagctagagcaggacaccgccaagctgaaagaggccgggatgaagtgtggctacgccagcggctggcagggctggatccagattgaaaacttcagtgcctggcacggcctgccggtagcaaccaagaataacggtttcgacggcaccgatgcggttctggaattcaacaagccggaacaaatcaaacacatccagttccttgaagacatgaataaaaaaggtgagtttacctatttcggtcgccaggacgagtctaccgccaagttctataacggcgactgtgcaatgacgactgcgtcttccggttcactggctgacattcgtcagtacgccaaattcaactatggtgtaggtatgatgccgtacgacgccgatgtgaaaggcgcaccgcaaaatgccatcattggtggcgcaagcctgtgggtcatgaaaggcaaagatgcggcgacctacaagggcgtggctgaattcctgcaattcctgacaacaccggcgatcgccgccgaatggcaccagaaaaccggttatttgccggtcacgacggcggcctacgagctgaccaaacagcagggcttctatgataagaacccaggctccgacgtggcaacgcgtcaaatgatgaacaaaccaccgttgccgttcaccaaaggcctgcgtttgggcaacatgccacagattcgtaccatcgtggatgaagagctggaaggcgtgtggagcggtcagaaaacggctaagcaggcgttggatgagtccgttcagcgcggcaatctgctgctgcgtcgttttgaagcctctgtgaagcaataacgaacgtcttttaaccgggcagagtgcgccattctgacactctgcccctgtttttggcgacgttcgcagccgtttgtcttctgttctccgccttatatttcgatgagtcattcatatgagttcacaccgtcccgggtttggctgtagctggctgccctatgcgctggttctgcctcagttattgattacggcgatctttttcctgtggcccgccggtcaggcactgtggtattcggtgcaaaccatggatcctttcggtatctccagcgagtttgccggtctgaccaactttcagcagctgttccaggatccttactatcttgcctcgttttacaccacgctgaagttcagctttatggtggcgttcttcgggctggcgatttcgctgctgctggcagccatggttgaccacgttattcgcggcagccgtctgtatcaaacgttgcttattttgccttacgccgttgcgcccgccgtggccgccgtactgtggatgttcttgtttagcccgggttagggttgatcacccatttcctaggcacgctcggctataactggaatcacgcgcagaacagcgggcaggcgatgttcctcgtggtactggcgtccatttggcagcaggtgagctacaacttcctgttcttcctggcggcgctacagtcaataccgcgttcgttggtcgaggccgcggcgattgacggtgccggtccaatacgtcgtttctttaatctggtgttgccgttaatttcgccggtcagcttcttcctgctggtggttaatctggtatacgccttcttcgataccttcccggttatcgacgccgccacgcagggtggtccggtgcaagccacaacgacgcttatctacaaagtatatcgcgaaggattcaccggtcttgacctctcaagctccgccgcgcagtcggtggtactgatggtgatggtggttgccctgacatttattcagttccgctttgtcgagcgtaaggtgcgttaccaatgatcgagaacagaagaggcctcgatattttctgtcacgtggtgctgattattggcgtgctgctggtgctgtttccgctgtatgtcgcctttgtcgccgcgacgctggacaacaagcaaatctttaccgtgccgatgagtctggtgccgggcgggcatttttttgaaaacatccgcaccatctggacgcagggcgcgggggaagcagtccggcgtttggcccgctgctgttgaacagtttcatcatggcgatggcgattaccgtcggcaaaatttccatttcgatgctgtcggcctatgccatcgtgtatttccgttttccgctgcgtaacctgttcttctggctgattttcatgacgctgatgttgccggttgaggtccgtatcttcccgaccgtgcaggtgatagccaacctgcatatgctcgacagttacaccggcctgaccctgccgctgatggcctcggcaaccgcaaccttcctgttccgccagttctttatgacgctgccggacgagctgctcgaggccgcgcgaattgacggtgcaggcgcgatgcgatttttctgggacatcgtcctgccgttgtcgaaaaccaacctggcagcgctgtttgttatcacctttatctacggctggaaccaatacctgtggccgatccttatcaccagcgatgcctcaatgggcacggcggtggcaggaatcaaaagcatgatctcctcgggagacggctcgacacagtggaatcaggtgatggccgcgatgatcctgacgttattgccaccccttgcggtggtgctcctgatgcagcgctggtttgtgcgcggtctggtagacagtgagaagtaattaactatggcaaacttaaaattacaggcagtgaccaagtcctatgacgggcagaatcagattattaaaactatcgatctggacgtcgccgacggcgaattcattgtcatggtcggcccgtcgggttgcggaaaatcaacccttctacgcatggtcgccgggcttgaacgcaccaccagcggcgatatttatatcgacgacgtccgcgtcaccaacctcgagccgaaagatcgcggcatcgcgatggtgttccagaattatgcgctgtatccacacatgagcgtgtacgacaacatggcttacggcctcaagattcgcggcttcggcaaggcgcagattcaggcacgggtggaagaggcggcgcgcattctcgagctcggtccgctgctaaaacgcaaaccgcgcgagctttccggcggacaacgtcagcgtgtggcaatgggccgtgccatcgtgcgtgaacctgccgttttcctgtttgatgaaccgctgtcgaacctcgacgccaagctgcgcgtacagatgcgtctcgagctacagcagctgcatcgccgcctgcgcaccacgagcctttacgtgacacacgatcaggtggaggccatgaccctggccgagcgcgttatcgtgatgaacaaaggtattgccgagcaaatcgggacgccgtccgaggtgtatcaacgtccggcgagcctgtttgtggccagttttatcggttctcctgcgatgaacctattaccggggcagttgactactgacggaacttcgctggtgatggagggcggctacgagctgccgctgccgaaggcgcgaccggaatggggcggccgtgagttgaccgtcggcgtgcgaccggagcatattcagctgacggaagacccgcagcacggcattccgatggagcttaaaaaccttgagcttctgggcgcagataatctggcacacggcgtatgggcgggcagcggcgtggtggtgagactttcgcatgaacattgtccgtcggccggtacgcaattacgtttggttttgcccgcgcacgcgctacacttttttgattcgaaaagcggattacggatggagtgaacatgacagtatggccttatccaaagatcgtggcccatcgcggcggcggttcattggcgcctgaaaatacccttgctgcaattgatactggcgcgcgccttggtcaccgcatgattgagttcgacgtcaagctggcgcagggggggaaatctttctgctgcatgacgacacgctaaaccgaaccagcaatggctggggcgtggcggggagttagcctgggacaagctggtgcagcttgatgccggtagctggtatagcacccactttagcggcgagaaattgccgctgttgtctgaggtggcggcccgctgtgccaaatacggcatgatggcaaatatcgagattaagggcacgaccggcctggcgtatgagaccggagagaaggtggcacaggcggcacgcgagctttggcatgggcaggcggttcaacctctgctttcctcgttcgatgtgccttcgctcgaagccgcacaggcagccgtaccagaactgccgcgcggtttgctgttagacaagtgggacgaaaactggcaggcgttgaccacccgcctgggctgtgtctcattgcatatcaaccacaaagagttgactgaagaacgtgttcagagcctaaaacaggccggtctgcgtattctggtttacaccgtcaacagccctgaaagagcatgtctgctgctcggctggggagtggattgcatctgtaccgaccgcatcgacctcatcggtccggactttggcagttaagtctatttagtgggtgaacaagtccttggtatcaaattgagtgtcaaatttaacatcagggacttgttaattgctttagatttgcgccaagggctatggggtctgattcagtttctgctgtagccgctgttgattattatttatctggctttgctgcaaacgctgctgatcgtttagcgtctgggagcgcagctgcagctgttgttgctgctgggtgaacatctgatcctgctcaagctgacgttggtgcagctgctgattattcaacatctgctgctgcatcctctgctgggcaggattattcagcaactgttgttgcctttcgataggcgtctgggtgacggcggcgagcgcgcccgtggtcatcgccgacagtaacagagcgctcagaacttgatgaaagcctttcatggtcgatactcctgcaggttatttcttctcttaagtttactccatcggcagaccggtagagcaattttcggatacgccctgaatcgccactccaggctgcgcgtttagcgggttttcggcgaaatacgccgccagatagtcgataaatacccgtaatttgggggtgacgtgtttactcaccggccacagagcccagtaaccattttcggccgcgggcaggtgaggcagaacctgcgtcaatttcccctcctgcaagaggctgcgcgcctggtattccggcagacaggctattcccaaacctttcaacgtggcgtcgataatgacccggttggtgttgcatactatcgcggcgggcagctccgaggcgtcaggcacgccggtccactgctcgatgcgtccggtgctggggtatttatgcagcaggcaggcatgctgcgccaaatctgacgtatggcgcggggttccgcgctgggcaagatagtccggcgaagctacgatgacacgctgatagccgccgagaaagcgcgacttgagccgtgaatctaccggagtaccggtacggataaccgcgtcaaaaccctcttcgatgatatcgaccatgcggtcggtcatatcgatatcgagcgtaatttgcggataacgctgcataaatccgccgaccagcggcagcacgatgacgtcgacaaacggcaggctgattttcagttgaccctgcggcgcaaggtggctttccatcagttcaagctccgcgctttcaacctcggccagaatgcggcggcagcgttcgaggtactgtgcgccctcggtggtcaaggtcatactacgggtgctgcgataaaacagctgtgctgaaagacgtgactcgaggcgagcaatgcttttacccaccgccgaagaggaaacgcccagctgtttggcggtttcagagaagcttcgcgtctcagcgacctgcacaaatatttcgataccgctcagcttgctcatggtgaaatctcgtcattaaggagttttttgtccgatatgtttggaattttagcctatttttcttatatgcgatgttctttatcctgcgtgtcacgctgatagccatcttcagcgctttcactacaggaaaaatcgatgtcgcagtctttaccttctgaaaacagtattaacaggttaaaaatgcccgcccaagccgcgtcgccgtggcgaattttacaaaccgcgtggatagtcgtcgcagtatttatgctgtctaacgcgcctacgccactgtatatccattggaaaaagcagtttgattttacttccggcacgctgactctgatttttgcctgttatattttggcgctggtgataaccctgctggtcgccgggcaactcgcggaccggctgggcaggaagaagattatcctgccgggactcatggcttcggtactggcctgtgtgtgttttattgatgcgggatcggtctatgcgctgctggtcgcgcgtttcctgaccggagttgcggtgggcattaccgtgacggcgagtatggctgcggtggtggacgccggaggagaaagccgtaagcggcaggccgcgctggtggcatcgattgccatggtaaccggcgcagggctggggccggtgatgagcggcgcggtagtacgcttcctgccgcatccggtatttatcgtgtttgccatcgaactgttggtacagctaagcgcgatagctatcgcaatacgtttgccggccaaagtaaaacgcttaaatgaaacgccgcgtccgctgcgcctgccgtcgattgcgtcgaagcatatttttcatctgattttgggcgtactgttcttcgcgccggggctgacctcaacctcgctgatgctgtcactggggcccgtattgctgaatcatttttcgggtgcgggaagcccggtggtggcggggttatggcctgcatgatgtttatggtcgcggtgggaagccaactgctgtgccgccaattgccaacgacccgcgtgttctatttcagtgggacggcactgatgattacgatgctgtgtctcgttctggcgctccatggggaggcgagatagccctcttcctcgccgcgctggctgccggggctgcgcagggtctcgggcaactcggaggactcacgctgctgtcggtgaatatctccgctgaccgccgtgcagaagccaatgcgttgctcaatattggcgcctatattccggcgggcttactgcccgttgcgacaggttatctgattgatataaaaggtttcacgatgagcttcacgctcctcgccgctaccctggccgccgtgggcattgtggcgctgagcgtcgtcaccgcaaggcgtaaacagcagcgtgattaacctcaagcctctggcggcagggaaagcgtttttagcggtgacgccgcgccgttggggcgtgaggcatcgcgcacaaaaggcaggtgatcgtaggcgtgctggcgtgccgagcggataaacgcctcggtcaccgcctggcgctgttctccgtcgcgaacggcagcgtagaggcggctccacaggccatcacccaaggttttggtgaccaccagcccttgtttctcaaagctttctactacccagtgcggcagtgcagcaatccccatgcgcgccgacaccatctggatgagcagcagggtgttatccacgtttttcagcgctggactgacgcccgccggttgcaggaaatgacgccagatatccaggcgctgacgctgaaccggataaatcatcaggatctcgctgctcaaatcctccggtgtaatgacgtctttgttcgccaaaggatggtccggtgctaataccagacgtacttcataatcaaacatcggcgaatagtgcaggccgctgcgcggcagaatgtcggaggtcagcacgatgtccagctcaccctgttgcagggcgggctgtgggtcgaaggtcacgccagacttaaagtccatcagcacctgtggccagctctggtggaaggtgtcgagcgcgggcgtcagccactgaatgcagctgtggcattcaatcgcgatgcgcagagtagcctgttgcggttcgtggcaggcctgtaacgcctgctgaatctgcggcagtacctgttccgccaactgcagcatgatttcaccctgcggcgtaaaacgcagcggctggcttttacgcacaaatagtctgaaaccgagacgctgctcaaggtcgctaaattgatgcgacagggcagattgggtctggtgtagctgtgccgctgcggcggcaagagagccggtatttcgcagagcttgcagcgtccgcaggtgtttcagttcgatcatgagagtccttcactgtcactgtgaataatttgcgcttgtggaatatacagtacctgcggattatggatgtgtaaacatctggatggctaaatggggacttaaagatgacgatattgaatcacactctgggttttccacgcgttggtttgcgtcgtgaactgaaaaaagcgcaggaaagctactgggctggcaacatgactcaagaagaactgctggcaacgggccgcgagctgcgcgcccgacattggcagcagcaacagcaagctggcgtggatctgctgccggttggcgattttgcctggtacgatcacgttcttaccaccagcctgctgctgggtaacgttccggcgcgtcaccagaatgatgatggttcagtcgatctcgatactctgtttcgcctgggtcgtggccgggcaccgaccggcaaacctgccgccgctgccgaaatgaccaaatggttcaacaccaactaccactacatggtgcctgagttcactcagggtcagcggttcaaactgacctggactcagctgcttgacgaagttgacgaagcgctggcgctgggtcacaaggttaaaccggtgctgctggggccattgacctacctgtggctgggaaaagtaaagggtgaacagtttgaccgtctgtcgctgctcgatgatattctgcctgtttatcagcaggttttggctgaactggctaaacgcggtatcgaatgggtgcagattgatgagccggctctggttctcgaactgccgcaggcgtggctggatgcctacagaccggcctatgccgcgcttcagggtaaaactaagctattgctgaccacctatttcgacagcatcggacacaatcttgagaccctccgccagctgccggtgcaggggctgcatatcgacgccgttgccggtcacgactctctgaaggcggttgccaatgcgctgccaaaagactgggtgctgtcactgggagtgatcaacggccgtaacgtttggcgtgccgatctgagcacctggttcgaccgtctaaagccgctggttgctggtcgcaacgtctggctaggaacctcatgttcactgctgcatagtcctatcgatctgagcgttgaaacgcgtctggatgcagaagtgaagagctggttcgcatttgcactgcaaaaatgtgccgagctggcgctgttgaccgatgccctgaacaacccaagcgcagaagcacaggctaagctggccgaatacagcgcgccaatccgcgcgcgcaaaaactctacccgcgtacataatgctgccgtaggcaagcgtttggcggcaatcagcgcacgggaagtcgaccgtccaagcgcctatccacagcgtgcagaatcacagcgtgcacgctttaatctgcccgcctggccgaccactactatcggttcattcccgcaaaccaccgaaatccgtggcctgcgtctggacttcaaacagggccgcctggaccttaaaaactaccgtattggcattagcgagcacattaagcaggctatcaacgagcaggaacgccttggtctcgacgtactggtgcacggtgaagctgaacgtaacgacatggtcgaatattttggcgaacacctcgacggctttgtgttcacccaaaacggttgggtgcagagctacggttctcgctgcgttaaacccccggtcattattggcgacgtaagccgcccagaagcgatcaccgtcgagtgggccatatacgcacagtctctgaccgaaaaaccggttaaaggcatgttgaccggtcctgtgactatcctgtgctggtcgttcccgcgtgaagacgtgacgcgtgaaaccatcgccaaacagattgctctggcgctgcgtgacgaagtggaagacctggaaaaagccggtattggcatcatccaaatcgacgaacctgcgctgcgtgaaggtttacctttgcgtcagtccgagtggcaggcttatctgcgctgggcggtggacgccttcaaactgaatgccgcgattgctcgagacgacacgcaaattcacacgcacatgtgttactgcgagttcaacgacattatggactccatcgcggcactggatgccgacgtcattactatcgaaacctctcgttcagacatggacctgctggaatcgtttaaagaattcgaatatccaaacgaaatcggaccaggagtttacgatattcattccccgaacgtgccaagcgttgagtggattgaagacctgttgcgcaaggccgcagaccgcattcctgctgagcgtctatgggttaatccagactgtggtctgaagactcgcggctggcctgaaacgcgtgaatcgctcgcaaacatggtcaaagccgcgcagcgtctgcgcgccgctaacgtttaagctgtggtcgcagcgtgaatataccgggcgcttcggcgccctttttttatgccactttcctcgccattagtattttgtaacctctttatcaccgccccacgagccgcaacatgccacgcctgaggctgaattggttcagcggattgccgtttattgcgaccctcttttcgtctattggctaggcttaaggaagtgaaatcttttctcgattaactttctgacgacgtaaggagacaaaaatgagtcgatttaaagataaagtcgtggtggtcaccggtgcgggttctggcatgggggccgcaaccgcccagcgctttgccgctgaaggggccatcgtggtgttggtagggcgtaccgaaatcaaattggccaaagtggccaacacgctcgaaaccactaattactacgtccacgtcgccgatatctccaatccgcaggaggtcgaaaggttggcgcaggttgtgctcgacaaatttggacgcgtcgacgtgctggtcaacaacgccggtgttgtggtgcagggcaaggtgaacgaagccagcatcgaagactggaaaaagattattgatatcgatgtcggcggcgtgttctatgccactcgcttctttatcgaggcgctgaagaaaagcaaaggcaatatcgtcaacgtgtcttctgtttcggggcttggtggggactggggatgagcttctacaatgccgccaaaggtgccgtgaccaacttcacgcgttctctggcgttagaccacggtgccgatggcgttcgtgtcaatgctgtctgtcctagcctgacgctgaccgacatggccggtgacatcaaagaaaacaaagtcttattggcgaagttcgccgaacgtattccgctgggacgcggcgcagagccggaagaaattgcctcggtgattgccttccttgccagcgatgatgctcgattcgtgaccggtgtgaacctgccggttgacggcggtctcagtgcctctaacggtcagcccaaacaggcctgaatcgtataaactcacagaatactcagacttttaagcaatgagtgataagaaaaaggtcccgttagcgtttgccgacggggcctttattttgtcttttaaaaatggcgaaaaaacggcttatttcacgccgtatttggcaaaccacgccaacatgcgctgccagccatcttccgccgcttccgcgttatagcttgggcggtaatctgcgttgaacgcgtggccagcatcaggataaaccacgatttccgcattagcattcgccgcgcggattgcctgacgcatgctttcaactgtgtccagcggaataccgtcatccttgccgccatacaggccaagcactggcgcagtcaggtcaacggcctcatcgaccggatgcgtcggcgtcgacagcgttttattgccgaccagtttaccgtaccaggcaacgccggccttcaactgagggctgtgtgccgcgtagagccaggtaatacggccgcccagcagaatccggtaatggccaatttactggcatcgccaccgtgctgcgccgcccagtgtgcggtgtggtccagatcggccagtacctgctggtcgggaaccttactcaccagattattcagcagctcgccaatatcgctatattcagaaggatcgccctggcggaaataaagctcaggcgcgatcgccaggtagccttctttcgccagacgacggcacaggtcacgaatatgttcgtgaacgccgaagatttcctgtactacgataacgatgggcagcttaccggtatattcggcgggcctggccagataggccggcagattctctccctgagaagggatagtggtctcacccgcatgcaggccttcagtatccgtgtgaatagtcgaagcagatacaggcgtaacggcaggggagaaactgtcaggtgcttgttttagttgtattaagtcatctttcttcattgcagtctccatacagggtaagcactttgttttcacgtagagtttcagattttaaactataagccataaaggcagcacatcaacaaccatagtctgtcctctcgtttagccttgcgtaaaaaatgcttagctgagcgaaaattaatctgattgtcatgcggataacagggttttattgccataaatgcgcattcatgactagattgttgtgatgtaaatcacattgtgtatgtaataaatgaacgtaaagatgccgcttagcgatttcaatcacaaaatgaagcggcaaggcacgataaagtgacaaggtatttcatcagcaacgttatgaatcaataacggcttgaccgaataaaacatcacccgaattaaaaggagtttatttatgtctcagtctgacgttttccatcttggcctgaccaaaagtagcctgcagggggcgacgctggccattgttccgggtgaccctgagcgcgttgagaaaattgcgagactgatggagaatccggttcgtctggcgtcacatcgtgagtttacgtcttggcgtgcggagctggacggcaagtccgtcatcgtctgctctaccggcattggaggaccttcaacttcaattgcagtggaagagttggcccagctgggcattcgcactttcctgcgcattggcaccaccggcgctattcagccccatatcaacgtcggtgacgtattggtcacgacggcagctgtgcgcctcgacggtgccagcctacactttgccccaatggagttccctgcggtggccgatttcacctgtacgaccgcgctggtcgaggcttccaaagccgtgggcgcgaccgtgcatatcggtgtgactgcctcctccgacaccttctatccaggacaggaacgttacgatacctattcgggccgcgtggttcgtcgttttaaagaatcgatgaaagagtggcaggaaatgggcgtgatgaactacgaaatggaatcggcaacgctgttgaccatgtgtgcgagccagggcctgcgtgccgggatggtcgctggagttatcgtcaaccgcacccagcaggaaattcctaacgccgaaacgatgaagcaaacagaaagtcatgcggtgaaaatcgtggtcgaggcggctcgtcgtctgatctaatactgagaaagacctgatttgttcatgatcaaagtctgagttatagcaaaatacgggtcgccaattggcggcccttttttatctcgggccggctatctggtattgtcatgacattcactattagatttttcagaggcccttatgtcggcaaccattttacttcacccttcactggctcttttacagggcggcgtcaatttccgtgacctgggcggcaacactgtcgctgatggccgtcgggtcaaacacggttggctttatcgctcgggtgccctggatggcctgacagaacaagacataggctatttaagcaaggtcccggtcaaacatgttctggactaccgtgatgaggaagaggtcgaggcgcaaccggacgttctctggactgaatgcgagtatcaccacgtcccgcgaacccgccgagcgacgaggtcagcgctaatctggtcggcctgaaccttgagaccctatccgagtttgatcctcagacctttatgctggatctttatcgccgcctgccgtttaacaaccaagcctataaaaagctggtgagcctgctgcttcagccgggcggtggggctatcgtgcaacactgtgccgtcggtaaagaccggacaggtatcggttctgcgctggtgcttctggcgctgggtgcaagtatcgacaccgtaaaagaagattacctgctgaccgacaccacgctggcacccttccgtgaagcgctgctcgaccgactgtcgaccaatctgccgccttctgcgctgaagaagttcgaatacgtgctttcggtgcgtgaaagcttcattgatgcggcgttggaagccattaccgagcagtatgacacgctcgataactggctggagaaagagtacggtttaaccgccgaagttcgtgaagaactgcgcgcgcgttatctggaatagcccttccgttaagctccggttgtcattggataacttttaatggaatgacatcaagacaaaacggcacagcgtttttaaaacacgggcggtgattttgagcattagcgaagttattcattacgtgacggaatttgtccgtcagcatcaggcttgggcagtgcctatcgtatttttcctggcttttggcgagtcactggcttttctgtctctgctgcttccggccacggttatcctgcttggcctgggagcgcttatcggtgaggcggggatccccttctggccgatttttgccggcgcggcggccggagccttctttggtgactggctatcttactggattggttcgcattatcgagacagcgtgccgcatatctggccttttaaacgccaccctcaaatgcttgaacgcggccacgccttcttcgagcgctggggtatgcctggcgcctttataggccgtttctttggtcctctgcgagcggttgtaccactggttgccggaatttgcggtatgccacagcgctattttcagctggcgaatttcacctcggcgttggtctggggttcgggatcctcgcacccggagcctttggtattaaatggctgggccagttcttctgaccgccagcgttatgaaagaacgtctttcttgccttcttcctgggaggcatctcccaaagcaccgacgtaagaattaaaagcatctggacatccatacagtatgcatttattttgacctgcaagagactcagacagaggaaaaaccgtggatatcagcattatttacgcggtaggcgcggccttggtcggccttttgctgggctggttgattgccagtttacgtctgcagcagcggcaggccgacagcgagacgcgctacagattgctgcaacagtcacagacgcagctggccagcgagaaagatgccctgcagcgtgaaattgcgctggcaaaacagcagcagcgcgaaggcgagatagaactgcgcaagctttacagtgcgcaggccgccagcagcgaaaaacttcagcttctgacgcattggcaaagtgaatgcgaacagcttaatcaagaactgcgggctcagcgtgaaataaacagcgcacaggaagccgagctgcgggaagtctcgacccggctcgacgaaacccgcatggcggccgaagagaaacaaaggctgctgatcaacagtgagcagcgtcttaatagccagtttgaaaacctcgccaaccgcatcttcgagcagaccggacgccgtgccgacgagcagaataagcagagcctggacaaactgctgttgccgctgcgcgaacagctcgacggatttcgtcgtcaggtgcaggacagctttgggcaggaggcgcgggagcgtcacacgctaacccatgaaattcgcagcctgcaacagctcaacgcccagatggcgcgtgaggcattgaacctcactaaagcgttgaagggcgacaacaaaacgcagggcaactggggtgaagttgtgctgagtcgcgtgctcgaggcttcggggctgcgcgaaggctatgaataccaaacgcaggtcagcgtgcagactgaaaataacaacagaatgcagcccgacgtggtggtgcgcctgccgcagagtaaagacgtggtcattgatgccaagatgtctctggtggcctacgaacgctatttcaacggcgacgacgacgccgaacgtgaatccgcgctgggcgagcatattgcttcgatccgcggccacattcgtatgttaggccgcaaagactatcagcagttgccgggcctgcgtagcctcgattatgtgctgatgtttattcccgtcgaaccggcctttttggtggctatcgaccgcgagccggaactgatcggtgaagcactgaatcacaatatcatgctggtcagcccgacgaccctgttggtggcgctgcgaaccatcagcaatctttggcgctacgagcatcagagccagaacgccaagcgcattgccgaccgcgccgcacgcctctacgacaagctgcgtcttttcgttgacgacatgcagtcgatggggcaaagcctcgataaggcgcagacaagttatcgtctcgcaatgaacaaactttcccaaggccgtggtaatcttatcggccaggttgagggcttcagggccttaggtgtcgaagttaaacggcctatcagtcccgcgcttgccgagcaggccagcgcggaagacgacccgcaatatcaggcctctctggaagaactggacgacgcgcgtgatggtgaagacaattcgcctctttcgaccgaaaccgcaccgccggatgacgatgcgcatcggccgctcgacgcgatggccgcgtcctcaaaacatttttgatttgttttgctcatagagtgaacaataattccgtgccttgaacaccgcgtgcggcgctaaacgcatcggtgatggggctttccccggggttctgatacactttccccaggcgatatactgaataagcaggcagaaacatggaaaagcagacgcaggaaaatgtagattctccagaaactacacactttggatttcgtaccgtagccaaaaacaacaaagcagagatggtcgctgaagtctttcactctgtggccgcgaaatatgacctgatgaatgacctgatgtcattcggtattcatcgtatctggaagcgttatgctatcgactgtagcggtgtgcgtcgcggccagcgggttttggacctggcgggcggcaccggtgacctgacggccaaattctcccgtctggttggcgagcagggcgaagtcgtgctggcagacatcaacgattccatgctgaaaatgggccgcgagaagctgcgcaataacggcatcgtgggcaacgtcagctacgttcaggcaaacgctgaagcgctgcctttcccagacaattacttcgactgcattaccatctcctttggcctgcgtaacgtgaccgaaaaagagaaagcgctgcgctcgatgttccgcgtgctgaagccgggcggtcgtttgctggtgctggaattctccaagcctcttcttgctccactgagcaaggcttatgacacctattcattccacattttgccaagaatcggcgagctggttgcgcaagacgcagagagctatcgctacctggcagaatctatccgtatgcatccggatcaggaaaccctcaaagacatgatgtctgacgcgggctttgagaacgtgacttataacaaccttaccggcggcatcgttgcgctgcaccgaggtttcaagttctgatatggaaatgccgatgttgttgactccgttattaactgctgccatcgagaccgcccttaatcaattgttgtttaaggatcgcagtatgaaggccgcgaggcttcgtctggctggcaaggtcttacgtatcgaactgcaggaactgagttcaccgctgacgctaatcttcagtgagcaaaaaattgacgtggtaggccaatgggatggtgaggcagactgtaccgtcatctcacgcctgtccgtgctgcgtaaattgcgtgaccggcagcagctggctcctctgattcgcagcggcgacttaaacgtcgaaggcgacattcaggtggtgcagcaattctcggctctgatggacatgtccgagtgggaacccgctgaattgctggcaccttacatcggcgacatcgccgcgcagggcattagccaggcgatagcgggaggcttccgctttctgacgtttggcgttaaaaagcatcagggacagatagctcaggcactcactgaagagtggaagcttgcgccgggcgcactagaagctgcctggtttaacgatgaagtttctgccgttgaacgtcaggcccttgcgctggaagcccgcattaacaaactactgggagggaattgatgactccaggtgaaatgcgtcgcctgtatctgattattcgggtatttctcacttatggcctcgatgaactgatccccaagattaaactgacactgccctgagactggggcgttatctgttcttctggatcccttttcgtcacaaagataaacagcttggttcgcgtctgcgtctggctctcgaagaacttggcccggtctggatcaaattcggccaaatgctctcgacgcgccgcgatcttttcccgcctgacgtagccgatcagcttgctctgctgcaggaccacgtcgctccgttcgacggcgcactggctcgtaaacatattgagctggcgctgggtgggcctatcgaaacctggtttgacgattttgaccagaatgcgctggcctcggcctctattgcgcaggttcatacggcagttctcaaagagaacggcaaaaaagtggtcctcaaggttatccgccctgacatcatgccgattatcaaggccgatacgcgtctgatgtcgcgtcttgcaggctgggtatcgaagctgttgccagacggtcgtcgtctgcgaccgcgtgaagtggttagagagtacgaaaagacgctgctggatgagctgaacctgctgcgagaagcagctaactctattcaactacgtcgcaactttgaaaacagcccaattctgtatgttcctgaagtgtactcggattactgccgtgaacggctgctggtaatggaacgcatctacggtatcccgatttccgacgtggctgcgttggaaaagcagggcaccaacatgaaagtgttggccgaacgcggcgttcaggtatttttcacccaggtatttcgtgacagcttctttcacgccgacatgcatccgggtaacatttttgttagctatgaaacgcctgaagatccttgctacatagctatagattgcggcatagttggatcgcttaacaaagacgataagcgttatctggccgagaactttattgcattcttcaaccgtgactaccgtaaggttgccgagctgcatgtcgattctggctgggtacctcgtgacacaaacgttgaagagtttgagtttgctattcgtaccgtatgtgaacccattttcgaaaagccgctagcagaaatttctttcggtaacgtattgttaaacctgtttaataccgccagacgcttcaacatgcaggtgcagccgcagctggtcttgctgcaaaaaactctgctttacgttgaaggccttggaagacaactctatccacagctcgatctctggaccacggcaaaacctttcctggaaagctggatccgcgatcaggttggcctgccggcaatggttcgtgcgtttaaagaacgtgctccattctggattgagaagcttcccgagcttcccgagctggtatatgacagccttaaacagcatcaacttatgcagcacaatattgaaaaactgactaatcagttacaaacgcagaatgaacgtcagggccaatcgcgctatcttttcggcgttggagcaacgttgctcatcagcggtacggtattaatgctgggcaaggttgagatttaccctgtatggctgattgctgcggggctggtctcatggattatcggatggagacgaaccggacagaccgagtagccgataaaacaaaaatgaagttatgcgtcgcctctgcggcagtcattaattccagcactcaacgaccgggagccaaaggctcaggtacggcgagtgcttaaaaattgaggtaaataccatgggtgcatttagcctaacgcactggctggtcatcgcggtcatcgtggtgctgctgttcggtaccaagaaattgcgtggcctcggtagcgaccttggcgcatcgatcaagggcttcaagaaagccatgaacgacgaagatacgaccaagacgcacaaagacactgaaataaacgggtctgatgcagatttttcggccaagtctatcaatagcagcaagccggaaacgaaagcagaagaaactaagagtcaaaacaaagagcaggtataagccgtgttcgacattgggtttagtgaactgctgttggtattcgttattggtctggtcgtgcttgggccggagcgtttacctgtagcggtaagaactgttgcgggctggatccgtacactacgatcgatggcagcatcggtgcaaaatgaactgaatcaggagctgaaactgcaggaactgcaggacagcctgaagaaggcagaagaggccggattaaagaatttgtcgcctgaaatcaaatcgtctatcgatgatttgaaagaggcggcttcttcgatgaagcgttcaattcatgagaacctcagcccggctgaccaggcaattgccgacgcgaaagacggaaacacgattcataaccccgtgctcaaagatgccgaggcgcacttcgatgaaggcgtctctcctgcatcggcggcacacgttgctgaatctcctgcggcgaaacctgctccttcttcacaaccaacgggtgaacgctaaacatggctgttgatgatacacaaccgcttatcagccatctgatagaactgcgtaagcgtctgctgaattctattatttgcgtgattgtggtgtttttggcgctggtttacttcgccaatgatatttacgacctggtttctgctccattgatcaaagtgatgccatcaggcgccagtatgattgcgacggacgtggcatcgccattctttacgcctatcaagctgactatgattgtttcggtgtttgtctcggctcctttcatcctttatcaggtgtggggtttcgtagcaccggcgctttacaagcacgaacgccgtttgatgatgccactgcttatctcaagctccttcctgttttatctcggcatggcgtttgcctacttcctggtgtttccgctggctttcgcattctttgcgaaaaccgcaccggctggcgtagagattgcgacggacattaataagtatctcgacttcgtgatgaccatttttatggccttcggcgtgtctttcgaggtgcctatcgctatcatcttgctgtgctggaccggcgtaaccaatcctcaggatttacgcaaaaaacgtccttatgtgctggttggtgccttcgtggtcgctatgctgctgacgccaccagacgtcttctcgcaaactctgctggcgataccgatgtattgcctgtttgagattggcgtgttctttgcccgctactatgtggggaaaggtcgtcgtgataatcaggacgaagacgtggacagcgaatctgatgcgtcctaagcgataaaacaagattaacaaaccgccccgatgggcggtttcttttttgagagacagtatgtttgaaattggcctgaatttaaccagtaatcaatttgataaagaccgtgcagaggttgtggcgcgcgccaaagaggcggggctgagcggcatgctgattaccggcacctcgctcgaagaaagccagcaggcacagacgttggcggcgcaataccccgattattgctggtcaacggcgggcgtgcatcctcatcaggcgagtcagtgggacagccgcgttgagcaggcaatccgcgctttagccgccgaagccaacgtggtcgccattggcgaatgcggtttagactttaaccgcaacttctcaacgcctgccgatcaggaacgcgcctttacggcacagcttgccctggccgccgagctgtcgctgccggtgttcctccactgccgtgatgcacatccgcgttttgccgagctgctcacgccctggctgccaaagttaccgggtgccgtagtgcactgttttaccggcagccagcaagagcttgaacactatttatcgttgggcctgtcgatcggtataaccggttgggtatgtgacgagagacgcgggctggagctgcgcgagatgctaccgctgatcccagtcgatcgcctgcttctggagacagatgcgccgtacttattgccgcgtgatttggaaaacaagccgaagaatcgccgtaatgaaccctgcttcctgccgcacattgtcaggcaggtggcgctgtggcgcgctaaagatgaggacccggtatggcttgcgcaaataaccgacgacaacgcgcgtcggctatttaaaatttaagccgtagctgaggcagaagagcgggatgtgtcagattttctgaaattcagtattgctgatgctttgtctcacctgtttatttagcaggtttaacagcaggtgagaacgcctttcgccatcaggttcggtatagatagcctgcaggccttcgaatgctccgtcgatgataagaacagtatcgccttcgtgcggcgtctcgggatccctaacgtcggacggaggttcattgatcagttgttcaataaccttagggtggaccgtggcaagctgatttccaaaacggacaaaatggctaacaccgcgggtcgcactaatggtcgtggtatggattttttcaggatcaaatgcgataaacatataattcggaaatagaggttcatccgccatcgttcggcgaccgcgcaccattttttccaacttgatcgtgggaaccagacattgaacgtgttgacgctcaagatgttcctgggcacgaagatgttgacctcgtttgcaatacagtaagtaccagctttccatttttcattttcctcgtgacgaacacgttgagaataacaaaagctttaagggataaatagccgcgcgtgcggcccccattggtagtaatgataacattcaacaagataaccatcttcggagaaaagtcatggagttgttcctactcagcaacggcaaactttcgggcgatagccagcttctcggctatgcgcaccagcagatcaaggcgatgtttgaggctcgcaacatcacttctgcggtgtttattccttacgccattattcgcggcgactacgatgaacgtgctcgcgacctcgagcagtcgttgggcatcaaggtagagagcatccatcattctgccgtgccgtctgaggctatcgaacaggcgcagtgtattctggtcagtgggggcaatacctggtttttgaaccagatgctgcacgagaaaggtctgattgtgccgattcagcgcgcggtgcgtgaacgcgaagtgccttatctcggttggagcgcgggctgcaatgtcgccacgccaagtatccgtaccaccaacgacatgccggtacgttcttccgttgtcctgcctgcgttgggcctgttcccggtgcagatcaatcctcattacattgacgctcacatcagcggtcacatgggtgaaacgcgagatgagcgcctcgccgagttctgtgcggtgaacccgaccgagtcggttgttgccctgcgcgaaggcagcatgctgcatgtttcaggcaatgagctgagctattacagcgctaaaggcgagggcttcaaggtcttccgccatggacaggaaacgcaggaatatcgggacacgcgagcactttctggccttgttccctttacctgtgtttaatagattagtcagccttacgggcctgaaataatcctgctggtcgttcagttttggtccattaaaattgaaaaaagcagccacggcggccgacaggctttatactgccctctaaatttggtgataaaacattaatgacgtgcctcgtatgaaatatcgtgacctgcgtgacttcctgtctttgcttgaaaagaagggtgacctcaaacgcatcagccagcccgttgatacttacctcgaaatgactgaaatcgctgaccgtacgctgcgtgcgggcggaccggcgctgctttttgagaatccgaaaggctataacatgccggtgctgtgcaacctgttcgggactcccgagcgtgttgctatgggcatggggcaggacgacgtcagcgcgctgcgcgacgtgggcgagttgctggccttcctgaaagagcctgagccaccgcgtgggttccgtgatttctacgacaagatgcccaagttcaagcaagtgttgaatatgcccaccaaatgcctgagctctgcgccttgtcaggaggaggtctgggaagggatgatgttgacctggggcgtatccccgtcatgcactgctggcctgaagatgccgcgccgcttatcacctggggcctgacggtgactcgtggtccgcacaagccccgtcagaatctgggcatttatcgccagcaggttctgggcaaaaacaaactgattatgcgttggctgtcgcatcgcggcggcgcgctggacttccaggagtggtgtcagcagaacccgggcaagcgtttcccggtttctgttgcgcttggcgctgacccggcgaccatcctcggtgccgtgacgccggttcctgacacactttctgaatacgctttcgcgggcctgctgcgtggcaacaagacggaagtggtcaaatgtatttctaacgaccttgaagtccctgccagcgcggaaatcgtgctcgaaggttacattgagccgggcgaaatggcaccggaaggcccttacggcgatcatactggctactataatgaagtagatagcttcccggtgtttacggtcacgcacattactcagcgcaaagaccccatctatcattcgacctttaccggtcgtccaccggatgagcctgcggtattgggactggcgctgaatgaggtcttcgttccaatcctgaagaagcagttcccggagattgtcgatttctatcttccgcccgaaggttgctcataccgtctggccgttgtgacgatgaagaaacagtatgccggacacgccaagcgcgtcatgatgggcgtctggtccttcttgcggcagtttatgtacaccaagtttgttattgtgtgtgacgacgacgtgaatgcgcgcgactggaaagacgttatctgggccattactactcgcatggatccagcgagggatacggttctggttgaaaatacgcctatcgactatcttgattttgcttccccggtttcagggctgggttccaaaatggggatggacgccaccaacaagtggccgggtgagacacagcgcgaatggggacgtccgattgtaatggaccctaaagtgcgcgatcgcgttgacgctatctgggacgagctgggcatttttgataacgtcaagccgggcaaataaactctcgatgacaaacggcgctcggcactgtttgtcatcactgattcaatgatgaccctcagagggaacgcatgacaataatgagctgtaaagtgtcctcagttgaggccataaccgacaccgtatatcgggttcgcctgcaacctgaatcatctttttcatttcgtgccggtcaatatctgatggtcgtgatggatgagcgcgacaagcgtccgttctcaatcgcttcggtacctgacgaaaaaaactatctcgagctacacatcggggcttccgagatgaatctgtatgcgatggcagtgatggatcgcattctgaaagagcagacgattaacgtcgacctgccgcacggcgatgcctggctgcgtgaagatggcgatcgtccgctggtgttgattgccggcggtaccggattctcctacgtgcgttccattttggtgacggcgctgaagcaaaagcctgagcgcgatatttccatctattggggcggtcgtgagctgaagcacctgtacgacttgggtgagcttgaagcgttgagcgtggtacacccgaacctgaaagtgatcccggttgttgagcagacggaagagggctggcagggccggaacggcaacgtactgagcgcggtattgcaagacttcgaatcgctgagcgagcatgacatttacatcgccggtcgtttcgagatggccaaagtagcccgcgaacgtttctgtgccgagcgcggtgcgcttgaagaccgcatgttcggcgatgcgtttgcctttatctgatttgccaaaaaatcggtaaaaaaacccgccccttgataagggcgggaaaaacatcaattgcacactttcaaccttgtcttgcactgaaacctttcttctatacccgctcaaaaacggttgctatcccctgacccaatccaatgcacatggttgccacgccaaactgcgcgtctttgcgttccatcaggttgagcagcgtggtagagatacgtgcgcccgagcagcccagcggatgccccagcgcaatcgcgccgccgttgaggttcaccttgtgatctatgctctccagcaagccgagatctttaatgcacggcagcgactgggcggcgaaggcctcgttcagctcgaacaggtcgatgtcctgcaccgagagtccggcacgtttcaacgccagccgcgttgccggaaccggaccgtatcccataatcgacgggtcacagcccactacggccatcgcacggatttttgcccgcgccttaaggcccagggaggccgcgcgtgactcgctcatgatgagcattgccgaagcaccgtccgaaagcgcggaggaactgcccgccgtcaccgtaccattgaccggatcaaatgccggacgcagcgccgccagcgacgccgcagtggtttcagggcggatgacctcgtcgtagtccaggccaatcagcgtgccgtcggcattgtggccgtaggttgggatgatttcattggcaaaatgtccggcaacggttgccgcatgcgcgcgctggtgcgaacgggcggcgaattcgtcctgcatttcgcggctgatattgtgcatcttggcgagcatctcggcggtcaggcccatcatgcccgctgcttttgccaccgtgcggctgaggccgggatgaaaatcaacgccgtgattcatcgggacatggcccatgtgttccacgccgccgatcaggctgatgtccgcatcgccgaccataatggtgcgtgccgcatcgtgaagggcctgcatcgatgaaccgcagagccggttaaccgtgaccgccggtacgctgtgtgggatctcggccagtagtgccgcattgcgcgccacgttgaagccttgttccagcgtttgctgcacgcagccccaataaatgtcgtcgatttctttcgggtccagcgctgcattacgcgtcagcagggcgcgcatcagatgcgcagataaatcctcggcccgcacgttgcggaaggctccgcctttggagcggcccatcggcgtgcgaaccgcatccactatgactacgttttccatgattccgctccttatgcctgacggcccatgttgatatcagccaagggtacgggctgtggataatagctttcattcatctcagctttgcggcgcaggccgtcgggcgcctgatagagtgggccgagatgggcgtagtgttcggtaagctgcaggtattttgcagtgcctagggtatccagataacggaatacgccgccgtggaacggagggaaaccaataccgtagaccagcgccatatccgcttcggccggactggctataatcccttcctcaaggcagcgcacgacttcgttaatcattgggatcatcatccgcgcgataatttcttcagggctgaaggtcgtcggcttcgcatcagcctgtgccaacagcgtattcacctcggcgtcctgatctttacgcggtttgcccttgctgtcttcgctgtagcgatagaagccaagctgatttttttgcccaaaacgttcagcgtcaaacaggatatcaatcacatctcgatagtctttggccatcctgtccgggaagccgttggccatgaccgcgtgggcgtgatgcgcggtgtcgatacctaccacgtcgagcaggtaagccgggcccattggccagccaaactgtttttccatcactttatcaatctgaatgaagtccgcgccgtcacgcatcaacaggctaaagccggcgaagtaagggaacagcacgcgattgacgaagaatcctggacagtcatttaccacgataggcgttttgcccattgctgaggcgtaggccaccacgcgggacagcgtctgttcggaggtcttgctgccgcggatgatttcaaccagcggcatacggtgtaccgggttaaagaagtgcatgccgcagaaattctcagggcgcttaagagccgccgccagcgtgtcgataggaatggtcgaggtattggaagccagaaccgcgttgctctcaagcaacgcttcggcctcggccagcaccgcagctttgacctttggattctcaaccacggcttcaaccacaacctgagcgcgttcaatgccgctgtagctgagtgtcggttggatagtcgagaggatctttgccatcttaaggccatcaatcttgccgcgctcaagctgtttgttcagcagcttggccgcttcgttcatccccaaatgcagcgatttatcgttgatatccttcatgatgaccggcacgcccttcagcgccgactgataggcaatcccgccgcccatgatacccgcgcccagtaccgccgcctgttcaggcttgccgttgctgcctgctagttttttggctttgctttttacgagctgatcgttgaggaagatacccaccagtgcacgggcctcggcagactgtgcgaggggacgaagctgccggtttccagcgcaagcgcttcatcacgacctagcgtcgcggcggcttcaatggttttgacggcggtcatcggtgcgggatagtgtttgcccgcggtttgcagcaccatgctttttgctacgctaaaactcatcgtcgcctcaatgcggctgagtttgagcggtaaaagtttaggctgacgcgcagcgcgccagtccagcttgcccgctatcgcctcacgcaggacggttagcgcggagtcgtgaagtttctcgacgctgacgacggcgtcgaccagaccgaccttcagggcttcgtcgccgctgaggtctttacccgccgcaataatttctaacgcgctgtctgcgcccagcaggcgcggcaaacgcacggagccaccgaagcccggcataatgcctaaacgggtttcaggcaggccgatacgggtatccgctgtcgcgacgcgaaagtcggtggctaatacacattcacatccaccgcccaacgcatagccactaatggccgatacggtgggcacggggagatcttcaagacggcagaaaatgccgttagcaaagcccagccattgttgcagcttttcggccggagcggtaaacagtgacaggaactcggtaatatcggcgccgacgataaacgcgggcttggccgaactaagcagtaaaccttttaattcagtacttttctcgagtatagaaatcgcctcgcccagactggcaacggtctgagtgtcgagtttattaacggagcctggagcatcaaacaccagctcggcaatcccgtcttcgagccagtgtaggtgtagtgtttcgccttggtagagcatgtctctctcctgaatcatcggtgatgatctggtatgaccagatgaaaggagtgtggttttgatgttaacgaaatgcaaatgagctgattgatatttgcaggcaagatcacaaagcccacggggctacggctgacatcgggctgtgataagatgcggcaacgtttttcatttatcgtatgaatccagtaaaggacaggtcgatggaatctctctctacactctataaagaacatatcgccgttttacaggcacgtaccctcgaaattctgcaccgcaatcagcttgatgccctgctaattcactcgggcgagctgcagatttccttcctcgatgactacagctatcccttcaaggtgaacccgcagttcaaggcctgggttcctgtcacgcaagtgccaaactgctggctgtgggtcgatggcgtgaacccgccgaaactgtggttctattcaccggtggattactggcacagcgtagagccgctgcctgactcgttctggaccaaagacgttcaggtgttgccgcttgcaaaagcggacgccattaaagcgcagctgcctgccgatttgtctcgcgtggcgtatatcggttacagcccagcgcgtgcgctgaacctcggtatttctgctgaccaccttaatccaaaggcggtgctggattatctgcactaccatcgcgcctacaagaccggctacgaagtggcctgtatgcgtgaagcgcagaagctggcagtgagtggccatcgcgcggcgaaagaggccttcctctccggcatgagcgaatttgacatcagtatggcgtacctgaccgctaccggtcatcgtgaaaccgaagtgccttacggcaatattgtggcgctgaacgaacacgcgtcggttctgcattacaccacgcttgaacatcgcccaccggccgagatgcgtagcttcctgattgacgccggtgccgagtacaacggctacgctgctgacttgacgcgcacctacgcggcaaaaagtgacaatgcttttgccgcgctggtgaaggacctcaataccgaacagcaggcgttgatcgatacgataaaacccggtgtgcgctataccgactatcatgttcagatgcatcatcgcatcgcgcgtcttcttaagtcgcacgggctggtggtgggtatgagtgaagaggcgatggtcgagcagaatctgacaggacctttcctgccgcacggtctggggcatccgctgggtctacaggttcatgacgtcggcggattcatgcaggacgaaaacggcactcatcttgccgcgccgtcacagtatccgtatcttcgctgtacccgtattgttcagccgggcatggtgctgaccatcgaaccgggcctgtactttatcgaatcactgctcgcgccgtggcgtgaaggtcagttcagtaatcattttgactgggcaaaaatcgatgcgttgaagccgtttggcgggattcgtatcgaagacaatattgttatccatgataatcgtattgaaaacatgacccgcgacctgaagctggcgtgatgcagccttatcctgttcctgctcagtcggtcgagattagcgaagagataaagaagagtcgttttatcacgcttctgcaaccgacgccgggcgttgaagcggcgaaggcgtttatccagcaggtgaagagccagcatccttctgcgcgtcatcactgctgggcctttgtagcgggtgcgcccagcgactctcaacagctgggattctcggatgacggcgagcctgcgggcaccgccggaaagccaatactcggacagctgatgggcagtgggataggggagattaccgctgtggtggttcgctactacggcggcataaagctgggtaccggtggcctggtccgcgcctacggtaacggtgtgcagctggcattggctcagctgtccgttattgaacgcgtgccacagaccgagtttttgctgcgctgcgactatgcacaaatctcgatggttgagacgttactccagcaggtcggtggcagcatagtacaaagtgaatacggtgccgccgtggacctgcgcctggcgttgccagcatatgaagcggcagaaatagcgaatcgactttttaacctcagtcgcggttcgctggttttgcagcctgtttgatcaatctatcgcaatttatctgctgaggaacgcgccagcatgcatttccgtgccataacccgcatcgtcggggtactcgtcatcctgttctccggaacgatgattattcccggcttagtggctttaatttatcgagacggggccgggcgcgcgttcagtgagacgtttttcgttgcgctggccatcggcctgttactttgggtacccaaccgcaagcagcgtagcgagcttaaaccgcgtgagggatttctcatcgtggtgctattctggaccgtgctcggcagcgtgggggctttacctttcctgttctcggagcatccaaacctttctgttactgacgcctttttcgaatcgttttccgggctgacgacgactggcgcgaccacgctggtgggcctcgacagtctgccgcacgctattctgttctatcgtcagatgctgcagtggttcggcgggatgggaatcattgtgctggcggtggccattcttcctatcctcggcgtggggggatgcagctttatcgcgccgagatgccggggccgctgaaggataacaagatgcgtccgcgcatcgccgagaccgccaagacgctgtggctcatctatattctgttgaccatcgtctgtgcgctgtcactctggggtgccgggatgtccggcttcgatgcgattgggcacagcttctcgactatcgcactcggagggttctcgacccatgatgccagcatcggctacttccacagtggtactatcaataccatcatcgccatcttcctgcttatctccggctgtaactacggtttgcactttgccctgctcagcggccgcaatatcaaggtttactggcgtgacccggaattccgcatgttcatcggcgtacagtttacgctggtggtggtgtgtacctcggttctctggctgcacgatacctatacttcagggcttgagacactgaatcaggcgttcttccaggtggtatcgatggcgacaacggcgggttacaccaccgacagtatttccaaatggccgctgttcctgccgattctgctgctctgttctgcctttatcggggatgcgcaggatcgacgggtgggggctaaaggttattcgtattctattgctgtacctccagggttcgcgtgagctgaaacgcctggtccatccgaacgccgtctacaccatcaagctgggtaatcgtgcgttgcccgaacgtattattgaggccgtgtggggattcttctccgcctacgcgctggtgtttattgtcagcatgttggcgattgtcgcgaccggggtggataacttctcggcctttgccgccgtgacggcaacgctcaacaaccttgggccgggtctcggtgtcgtggcggacaacttccagtccatgaactctgtcgccaaatggatactgatcgtgaccatgctgtttggtcgccttgaggtatttaccctgttagtcctgtttaccccaaccttctggaaggagtaagcagctcatggattcattattaagaaaggaaacccggatgaaagccttggtactttattccagccgagatgggcagacccacgccatcgcttcttatataggtaacattattaaagaagagggggagtgtgacgtcatggaccttcaggacgccgacgcgatcgacttgtctcgctacggcaaggtgatgattggcgcttctattcgctatggccacttttctccattgctcgacaagtttgtgaaacgtcacgtcgagcggcttaacgcgatgccgtcagcgtttttctcggtgaacctgaccgcacgtaaacctgagaaacgttctccgcagaccaacgcctatacgcgtaagttccttttggcgacgccgtggaaaccgacgcagtgtggcgtctttgccggtgcactgcgttatccccgttatggttggctggataaagtcatgatccagttaattatgcgtattaccaagggagaaacggacaccagtaaagaagttgaatatacggattgggaacaggtgaagcagtttgccgtcgattttgacaaattagcggtcaaaatatagtccaaaagggtcttaaataacctttttgtagaaaaagtaagcggtcgtgcgggttttttaaaaaaggggttgcggcccctcagaaactccctataatgcgcctccactgaccgggaacaacgactcctctaacgagaaccaagtcgccgggtcgggaagagaaaaagaaaaaattcgaaagaaaattcttgactcttcagcgggaaagcgtattatgcacctcccgcgccgcataagattcattgcgaacagcggcactgctctttaacaatttatcagacaatctgtgtgggcactcacaagacgatatcagccacctcggtggcaaaaaatatcaagtcttagagtgaccaagcagtaattcattatgaatgatgtgaagtaactttgagcatcgctgaacttgtttcagcaaatcgaacttttaattgaagagtttgatcatggctcagattgaacgctggcggcaggcctaacacatgcaagtcgagcggtagcacgggagagcttgctctctgggtgacgagcggcggacgggtgagtaatgtctgggaaactgcctgatggagggggataactactggaaacggtagctaataccgcatgatgtcgcaagaccaaagtgggggaccttcgggcctcacgccatcggatgtgcccagatgggattagctagtaggtggggtaatggctcacctaggcgacgatccctagctggtctgagaggatgaccagccacactggaactgagacacggtccagactcctacgggaggcagcagtggggaatattgcacaatgggcgcaagcctgatgcagccatgccgcgtgtgtgaagaaggccttagggttgtaaagcactttcagcgaggaggaaggcgttgtagttaatagctgcaacgattgacgttactcgcagaagaagcaccggctaactccgtgccagcagccgcggtaatacggagggtgcaagcgttaatcggaattactgggcgtaaagcgcacgcaggcggtttgttaagtcagatgtgaaatccccgagcttaacttgggaactgcatttgaaactggcaagctagagtcttgtagagggggtagaattccaggtgtagcggtgaaatgcgtagagatctggaggaataccggtggcgaaggcggccccctggacaaagactgacgctcaggtgcgaaagcgtggggagcaaacaggattagataccctggtagtccacgctgtaaacgatgtcgacttggaggttgtgcccttgaggcgtggcttccggagctaacgcgttaagtcgaccgcctggggagtacggccgcaaggttaaaactcaaatgaattgacgggggcccgcacaagcggtggagcatgtggtttaattcgatgcaacgcgaagaaccttacctactcttgacatccagagaatttgctagagatagcttagtgccttcgggaactctgagacaggtgctgcatggctgtcgtcagctcgtgttgtgaaatgttgggttaagtcccgcaacgagcgcaacccttatcctttgttgccagcacgtaacggtgggaactcaaaggagactgccggtgataaaccggaggaaggtggggatgacgtcaagtcatcatggcccttacgagtagggctacacacgtgctacaatggcgtatacaaagagaagcgaactcgcgagagcaagcggacctcataaagtacgtcgtagtccggattggagtctgcaactcgactccatgaagtcggaatcgctagtaatcgtagatcagaatgctacggtgaatacgttcccgggccttgtacacaccgcccgtcacaccatgggagtgggttgcaaaagaagtaggtagcttaaccttcgggagggcgcttaccactttgtgattcatgactggggtgaagtcgtaacaaggtaaccgtaggggaacctgcggttggatcacctccttacctcaagatacgcattgtgcagtgtccacacagattgtctgatagatgtaaacgagcaagcgctacctgttgatgcagtaagggaaaccttacgctgatacgaaagaagcgccgggttttatcacctggtgcggcattttcgtgtccccatcgtctagaggcctaggacactgccctttcacggctgtaacagggttcgaatccccttggggacgccacgccgataatgtgtgaaagacattatcactctgtaccttagcaggtcagaatttatcttaaagatgactttaacgagtcgtgtttaagatattgctctttaacaatctggaacaagctgaaaaattgaaatgatacagctgaacataactctccgtagaagtactgagttatgcgcacctgtattagagtctctcaaataatcgcagcctcgaatgttgtcactctttatgagtttataagacaccttcgggttgtgaggttaagcgactaagcgtacacggtggatgcctaggcagtcagaggcgatgaagggcgtgctaatctgcgaaaagcgtcggtaaggtgatatgaaccgttatacccgacgatacccgaatggggaaacccaatgtgatacgtcacattatcgcatggtgaatacatagccatgcgaggcgaaccgggggaactgaaacatctaagtaccccgaggaaaagaaatcaaccgagattcccccagtagcggcgagcgaacggggaacagcccagaacctgaatcagtttgtgtgttagtggaagcgtctggaaggtcgcacggtacagggtgatagtcccgtacacaaaagcgcataaattgtgagttcgatgagtagggcgggacacgtgacatcctgtctgaatatgggggaccatcctccaaggctaaatactcctgactgaccgatagtgaaccagtaccgtgagggaaaggcgaaaagaaccccggcgaggggagtgaaatagaacctgaaaccgtgtacgtacaagcagtgggagcctacttgttaggtgactgcgtaccttttgtataatgggtcagcgacttatattttgtagcaaggttaaccgtataggggagccgtagggaaaccgagtcttaactgggcgtcaagttgcaaggtatagacccgaaacccggtgatctagccatgggcaggttgaaggttgggtaacactaactggaggaccgaaccgactaatgttgaaaaattagcggatgacttgtggctgggggtgaaaggccaatcaaaccgggagatagctggttctccccgaaagctatttaggtagcgcctcgtgaactcatcttcgggggtagagcactgtttcgactagggggccatcccggcttaccaactcgatgcaaactccgaataccgaagaatgttatcacgggagacacacggcgggtgctaacgtccgtcgtgaagagggaaacaacccagaccgccagctaaggtcccaaagtcatggttaagtgggaaacgatgtgggaaggcatagacagccaggatgttggcttagaagcagccatcatttaaagaaagcgtaatagctcactggtcgagtcggcctgcgcggaagatgtaacggggctaaaccatgcaccgaagctgcggcagcgacgcttaggcgttgttgggtaggggagcgttctgtaagccgtagaaggtgaactgtgaggtttgctggaggtatcagaagtgcgaatgctgacataagtaacgataatgcgggtgaaaaacccgcacgccggaagaccaagggttcctgtccaacgttaatcggggcagggtgagtcgacccctaaggcgaggctgaaaagcgtagtcgatgggaaacaggttaatattcctgtacttggtgttactgcgaagggggacggagagggctaggctagccgggcgacggttgtcccggtttaagcgtgtaggggtgtagacctggtaaatccggtttactgtaaccctgaggcgtgatgacgagtcactacggtgatgaagtagttgatgccgcacttccaggaaaagcctctaagcatcaggtaacattaaatcgtaccccaaaccgacacaggtggtcaggtagagaatactcaggcgcttgagagaactcgggtgaaggaactaggcaaaatggtgccgtaacttcgggagaaggcacgctgtcgctaggtggaggaacttgcttcccgagccgaagacagtcgaagataccagctggctgcaactgtttaataaaaacacagcactgtgcaaacacgaaagtggacgtatacggtgtgacgcctgcccggtgccggaaggttaattgatggggttatccgcaaggagaagctcttgatcgaagccccggtaaacggcggccgtaactataacggtcctaaggtagcgaaattccttgtcgggtaagttccgacctgcacgaatggcgtaatgatggccaggctgtctccacccgagactcagtgaaattgaactcgctgtgaagatgcagtgtacccgcggcaagacggaaagaccccgtgaacctttactatagcttgacactgaacattgagccttgatgtgtaggataggtgggaggctttgaagcgtggacgccagtctgcgtggagccaaccttgaaataccaccctttaatgtttgatgttctaactcggccccataatctggggtgaggacagtgtctggtgggtagtttgactggggcggtctcctcctaaagagtaacggaggagcacgaaggttagctaatcacggtcggacatcgtgaggttagtgcaatggcataagctagcttgactgcgagagtgacggctcgagcaggtacgaaagtaggtcatagtgatccggtggttctgaatggaagggccatcgctcaacggataaaaggtactccggggataacaggctgataccgcccaagagttcatatcgacggcggtgtttggcacctcgatgtcggctcatcacatcctggggctgaagtaggtcccaagggtacggctgttcgccgtttaaagtggtacgcgagctgggtttagaacgtcgtgagacagttcggtccctatctgccgtgggcgttggaagattgagaggggctgctcctagtacgagaggaccggagtggacgcatcactggtgttcgggttgtcatgccaatggcattgcccggtagctaaatgcggaaaagataagcgctgaaagcatctaagcgcgaaacttgcctcaagatgagtcttccctgggacttcgagtcccctgaagggacgtttaagactaagacgttgataggctgggtgtgtaagtgcagcgatgcattgagctaaccagtactaatgacccgagaggcttaaccttacaacaccgaaggtgttttagagagacgagacgaaagtttcaagaaatcagcttgttcaaagattggttctgatggcggcctgcaggaatgtggaaagcggttgggatgaaacagaatttgcctggcggcagtagcgcggtggtcccacctgaccccatgccgaactcagaagtgaaacgccgtagcgccgatggtagtgtggggtctccccatgcgagagtagggaactgccaggcatcaaataaagaacaagccctagtcgaaagactggggctttttctcgtcggtaatttaagaaattccagttcaagagaaagcccctgtctgacgacaggggcttttttgtgcgcgtttactgaccattttcgccttacggtacctaaaaacattcgcgtcaccctcggcaggatcgggtaaactagagctaattaagccacgaatgagcgagtaaactgcgttatgtcgagtcacgacacatcactaaaaaatcttaataccttcgctatcgacgcgcaggcatcacaaattatcaccgcaacgcgtagtgagcatctgaccgaagcctggcaccttgcccaaaaaaatcatcagcctctattgctcctcggcgaaggcagtaacgttctatttctggaaaactttgcagggatcgttgccgtaaatcgccttaaaggcatcgatattacgcaaaccgacagcgaatggctgctacacgtaggtgctggagaaaactggcaccaactggtttgtcacactctggaaaacaacatcgctgggctggaaaatctggcactaatcccgggatgcgtgggttctgccccaattcaaaatatcggtgcatacggtattgagctacaaagcctgtgtaattatgttgatgtgctcaatcttgagagcggggaagtgatgcgtttatcggctatcgactgtctgtttggctaccgtgagagcattttcaagcattcttaccgtgacggatatgccatcatcgctgtcggtttacgcctgcaaaaagattggcagcctaagctgacctatggtgatttgacccgcatggatcctacaaccgtcacacctcaacaaatatttgagtcagtttgcgccatgcggcgcagtaaattacccgatcccgcgaaaaccgggaatgccggcagcttctataaaaacccaatcgtggatgccaaacgcgtcaatgcgctgcttgctgaataccctaacatgcctgtttacccgcagcatgatggcaacgtgaaactcgctgccggctggctggttgagaatgctggacttaaaggattcaatatcggcggggcggccgttcatcagcagcaagctttagtgttgattaaccaacacaacgccaccagcgccgatgtgttggcgcttgcaagctatgtccgtgataccgttgccgagaagttttccgtatggttagagcctgaggttcgctttatctcggcgcagggtgaagtgaatgcggttgaggccttatcatgaaagatattacggtaccgctgcgtctgatttcgatactctccgacggagaatttcattcgggtgaacagctcggaaccgaattaggcatgagccgtgcggcgatcaataaacatattcagaccgtccgagactggggattggacatctttaccgtaccgggcaaaggctatcgtctaccagcctcgatacagctgttagacagtgacaagattctggccgctttgcctgaagggaacgttgacgttctcccggtcattgattcgacgaatcaatatttgcaggatcgtattcacgagctgaactctggcgatgcctgcgttgctgaatatcagcaggaggggcgagggcgtcgcggtcgtaggtggttctcgcctttcggttccaatctctatctttccatgtactggaagttggatcaggggccagcggcagcaatgggcctgagtctggttatcggcatcgtgatgggcgaagtcatgcagcatttaggcgcggaagatgtacgcgtgaagtggcccaacgacctttacctgaaagatcgtaagctagcgggaatactggtggagttaacggggaaaaccggggatgcggcgcatctggttattggcgcgggcattaatctgcgtatgcgtgaacctgcggcagatgtgattaatcagggctggattaacctgcaggaagcgggtatcgacatcgatcgcaacgagcttaccgttaccctgctgaaagagttgcgcggtgcactacgcaagtttgaacaggagggctggcgtcatttattccacgttggcgcaatctggataacttcctcgacaggccggttaaactgcttattggtgataaagagatccacggtattgagcgcggtatcgatcagcagggcgctttattgctcgagattgacggagaaattaagacctttatcggtggtgaaatatctcttcgcggtagataagttttcatcaaatataaaaaaggggaccgtgagttccctcttttatacgtgtgaccctccctaaacagcaccgcgtaatctatttacgtaatcgcacactctcgactgcgtgattcgcacttttggtcatgatgaggctagcgcgctcacgggttggtaagatattttcttttaaattcaatccattaatttcattccacaggccggttgcgatctgcacggcttcggcttctgggagcttggaataatgatggaaataactgtcgggatcggaaaatgcgccctgacggaatttaagaaagcgattgatataccagctctgtaataagtcttccggtgcgtcgacataaatagagaaatcaacgaaatccgaaacaaatacgcgatgcgggtcgtgcggatagtccatcccgctttgcaatacgttcagcccttccaggattaaaatatccggctgattaatgactttgttgccatcgggtatcacgtcatagataagatgcgaatacaccggggcactgacatttttggcccccgacttcacttcagaaacaaacttaaccagctgatggatatcataagactgcgggaagcctttcttcttcatgatcccacgttcatttaacgtcttattgggataaaggaagccatctgtggtgataagctcgacgctacggtgctctggccagcggctcagtagcgcttgcaggagacgagctgtggtgcttttgccaacggcgacgctgcctgcgatgccaatgacgtaaggaattttctggccatcggtgcccaggaactgctcgagaacagcctgacgacggaggtttgaactgatatagaaatttaacagacgtgaaagcggcaggtaaatctgcgctacttcttcaagagacaggtcctcgtttatgcctttcagtttcataatttccgcttctttgagcgttaatggaactgagtcacgtagggctgcccactgagttctgtcgaactgtaggtatggggttgccaaagataagtctcttttcttcataagttaaagtctgcccgttagcgcaggtcaggaaaggcgttccacgccaactccagacagtaaaccagctggccattatagacagcttgcctgtgagcgtagacaattttcttattaacttatcgatttctttgattgagttaaaagatttttgagaacttctgaaagcagggaagggggaacccgcccctatcgtaagagaggatccgcacataacatcatgttaatacaatgttatattttctagttcgcaaactcgtgtggcaagggggcactcggtatcagacgtttgtaataaaccatttcaccctgccgcgaagagtaagattcctgatggtttgaggtgcgttttcccgagcaacggtaaccctgagcacgataaaaagcttccgccggagtgcctgcttctatatctagcgacaacaatccccgacggagagtaaaggcggtattctctagctcgcgcattagctgcttgcctacgccgcgtcgtctcgctgtgctatctacgaccagcgtcgagacagtcccacactgatctgaaggcttctctgcgtcgaggtcgagctgaacggtccctattacgccgtgttcatcgcgcgctatccacagcagccgctgattgcgtgagagcgccgcacgaagctcgtgaaagaatgcttcagcttctggtgcagagtctgacgtgtcagcctcaagcagcagcggtgtcagctcatcgcgataaatcggtaatgtagcggcattgagcaggacaattttcataatcacttctccgtagaggacgtgggagtatgggatgaggataaatttaagctaactcttgctaagcaataagcgcgccaaagagaagaatccttaaattacaggcgatgacgagagacatggggcaggaagtggcgcaaaactgtgcgacagatcactttcctggtgcagggggactcattttttaggggcgaagataaaaataaacgatcttttttctcacgattttgctttcctgcgaagaaagccggaaaaccgctgttcaaaaaacgtgcccaactggctgctctttaagcgataaacaggtcaaaagggggctaaaaacacctttttgaataaaacatgaccgaaagaacaattatcgcaatttttttgttgcatgacctgccaagtcccctagaatgcgcagcacttgatgccggcttagctcagttggtagagcaactgacttgtaatcagtaggtcaccagttcgattccggtagccggcaccatcaagtactttaacaattaggtggggttcccgagcggccaaagggagcagactgtaaatctgccgtcatcgacttcgaaggttcgaatccttccccaccaccatcttcctctgcgaggtagaaacggcagtagccgaatcgaccagcctgcagagtgaaagatgaaagtttataaccttgagtctccaaacattcagtcaaatgaaatagtgcgggtcttgaggtgaaggtgcggaattaagtgtttcatcgccttgtccccaccttgatgttcttcagaaaaatcaggtagccgggttctaggatgcgggcatcgtataatggctattacctcagccttccaagctgatgatgtgggttcgattcccactgcccgctccaactaactagatgtgctgatatagctcagttggtagagcgcacccttggtaagggtgaggtcggcagttcgaatctgcctatcagcaccacttctaaattcttccctccctgattttcttctgaaacttaattcaaacaagcaattgcttggttgatgtggtgataccaccgatctaaccgtgtctcagagggacaatcgatgtctaaagaaaagtttgaacgttctaaaccgcacgtcaacgttggtactatcggccacgttgaccacggtaaaactaccctgactgctgctatcaccaccgttctggctaaaacctacggcggttctgctcgtgcattcgaccagatcgataacgcaccagaagaaaaagcacgtggtatcaccatcaacacttcccacgttgagtatgacaccccatcacgtcactacgcgcacgttgactgcccagggcacgccgactacgttaaaaacatgatcaccggtgctgctcagatggacggcgctatcctggttgttgctgcgactgatggccctatgccacagactcgtgagcacatcctgctgggtcgtcaggttggcgttcctttcatcatcgtattcatgaacaaatgtgacatggttgatgatgaagagctgctggaactggtagaaatggaagttcgtgaacttctgtctgcttatgacttccctggtgatgacctgccagttgttcgtggttcagcgctgaaagcactggaaggcgagccagagtgggaagctaaaatcatcgaactggctggtttcctggattcttacatcccagaaccagagcgcgctatcgacaagccgttcctgctgccaatcgaagacgtattctccatctccggtcgtggtaccgttgttaccggtcgtgttgagcgcggtatcgttaaagttggtgaagaagttgaaatcgtgggtatcaaggacactgttaagtctacttgtactggcgttgaaatgttccgtaaactgctggacgaaggtcgtgcaggcgagaacgttggtgttctgctgcgtggtatcaagcgtgaagacatcgaacgtggtcaggttctggctaaaccaggttcaatcaaaccacacaccaaatttgactcagaagtttatatcctgagcaaagatgaaggcggtcgtcatactccgttcttcaaaggctaccgtccacagttctacttccgtacaactgacgtgaccggtaccatcgaactgccagaaggcgttgagatggtaatgcctggtgacaacgtgaacatggttgttaccctgatccacccaatcgcgatggacgacggtctgcgtttcgcaatccgtgaaggcggccgtaccgtgggtgctggtgttgttgctaaagttatcgcttaatcgctgatagttttttgtcactttacgttgacgcaacacacactaaaagggcatcattcgatgcccttttttctacgctatagcgccagaacctatctcatcagcgatttttcagtcataatcattggtgagataggctctagagatagcgtaaacaccgagcgtacgttctcgcctacattcggtttggtttgcctcgcaatgcgaggcaaagttgtttgttctgattcattgtgacgggttggtttatgagtgcgaataccgaggctcaagggagcgggcgcggcctggaagcggttaagtggattgtcgtagccgttttactggtcgtagctattgtcggtaactattattaccgtgcatacagcctgccgttacgtgcgttggcagttgtcgttatcatcgctattgctggtgcagttgcgctgatgaccattaaaggcaaagcaactgtcgcgtttgcgcgcgaagcacgtactgaagtacgtaaagtaatttggcctacacgccaggaaacattgcataccactctgatcgtggcagctgtaactgcggtaatgtcactgattctttggggcctggatggtattctggtccgtctggtatccttcattactggcttgaggttctaaaatgtctgaagcacctaaaaaacgttggtacgtcgttcaggcgttttctggatttgaaggccgcgtggctcagtcgctgcgtgagcacatcaaattgcacgacatggaagagttgttcggcgaagtgatggttccaaccgaggaagtcgttgaaatccgcggtgggcagcgtcgcaaaagcgagcgcaaattcttcccgggttatgtgctggttcagatggtgatgaacgacgccagctggcacctcgttcgcagcgttccgcgcgtgatgggtttcatcggcgggacctcggaccgaccagcaccgattagcgataaagaagttgacgctatcatgaatcgcctgcagcaagtgggtgacaagcctcgtccgaaaacgatgttcgagccgggcgagctggtacgtgtcaacgatggtccgtttgcagacttcaacggcgttgtcgaggaagtggactacgaaaaaagccgcctgaaagtttccgtttccatctttggccgtgctacaccggttgaactggacttcggacaggtcgagaagggctaatctccttcaatcctgctcttgagcagagattataaaataacctgtttcaggtgttgtatgaggcgcgaaattaaactataatttcgcgccttttgtttttatgctcggcaaaaatgttgaacggcagtccttgagagtgacgacgacattggcgttagcctaaaaactgatacgtaatgtatcgagagcgaaagctatcaaaaatcacggggagcctcttcaaacaggcgctaatacccaactgaggaaattaacatggcaaagaaagtacaagcctacgtcaagctgcaggttgcagctggctctgctaacccaagtccaccggttggtccggcactgggtcagcaaggtgttaacatcatggaattctgtaaggctttcaacgccaagactgaaagtcttgagaaaggtctgccgatccctgttgttattaccgtttactctgaccgttctttcaccttcgttaccaagacccctccagcagcagttctgctgaagaaagcggctggtatcaagtctggttccggcaagccgaacaaagacaaagtgggtaaagtaacgagtgctcaggttcgtgaaatcgcagaaaccaaagctgcggacatgactggttctgacgtggaagcaatggttcgctccatcgaaggtactgctcgttccatgggcctggtagtagagggataagaaatggctaagctgaccaagcgcatgcgcgtgatccgtgacaaagttgagtctaccaaacagtacgacatcaacgaagctgttgccctgctcaaagagctggctactgctaaattcgtagaaagcgtagacgttgctgttaacctcggcatcgatgcacgtaaatctgaccaaaacgttcgcggcgcaaccgttctgccacacggcaccggtcgttctgtacgcgttgccgtatttacccagggcgcaaacgctgaagctgctaaagctgccggcgctgaactggtaggtatggaagatctggctgaccagatcaagaaaggcgaaatgaacttcgacgttgttatcgcatctccagatgcaatgcgcgttgtaggtcaattgggccaggttcttggtccacgcggcctgatgccaaacccgaaagttggtactgtaactcctaacgttgctgaagcggttaagaacgctaaagcaggtcaggttcgttaccgtaacgacaaaaacggcatcattcacaccaccatcggtaaagttgacttcgacgctgataagctgaaagaaaacttggaagcactgctggttgcgttgaagaaagccaagccttctcaggctaaaggcgttttcatcaagaaagtaagcctgtccactaccatgggcgctggcgttgctgttgatcagagcggcctttcagcaactgttgcctaacttttaaagttagagtaagcacagtttgcttttatcgctttacgtgggcgatagatttgtctaaaatctatcccccgttcgttttataaaaagcgatagtgtttcggtaacacgaaaccaagaatttttcggttggagcctggcctatccaggcctccgtccaagaccgcaggagtctcgtcagagacttaatatttcctgcgtagacggtgacagagcctgaataaaaatttttctttttaagaatagttttgctggattctctgctcaccgtgtttgaacgcttatctccgatcccggggataagtgatgtgagttccggggattttccccggctaaatccaggagctaaagctaatggcattaaatcttcaagacaaacaagcgattgttgctgaagtcaacgaagtagccaaaggcgcgctgtctgcggttgttgcggattcccgtggcgttactgtagataaaatgactgaactgcgtaaagcaggtcgtgaagctggcgtttacatgcgtgttgttcgtaacaccctgatgcgccgcgtcgttgaaggtactccattcgagtgcctgaaagacacgtttgttggtccaaccttgatcgcgttttctcatgaacacccaggcgctgctgcccgtctgttcaaagatttcgctaaagcgaacgctaagttcgaggttaaagctgcggcctttgaaggtgagttcattccagctgatcaaatcgatcgtctggcaactctgcctacttacgatgaagcaatcgcacgcctgatggcaaccatgaaagaagcctctgcaggcaaattggttcgcactctggctgctctgcgcgatcagaaagaagctactgctgcttaatcagcaactttatttcttttcacgttacgcttacgtataaactatttctgttttctaggaacaaatcgacatgtctatcactaaagaccaaatcattgaaggcgttgcagctctgtctgtaatggaaatcgtagaactgatcgctgcgatggaagaaaaattcggcgtttctgctgctgctgctgttgctggccctgctgccgctgctgaagctgtagaagaaaaaactgaattcgacgttgtactgaaaggtatcggcgcgaacaaagttgctgtaatcaaagctgtacgtggcgcaactggtctgggcctgaaagaagctaaagacctggttgaatctgcaccagcagctctgaaagaaggcatcagcaaagacgacgctgaagcactgaaaaaagctctggaagaagctggcgctgaagttgaagttaaataagccactgctttctgagtgcagtctgttttaattaacagactgatggctggtgactttttagtcaccagcctttttgcgctatagagtgtcagtggtgtttcacactgtttgaccactgaactactccaatatttatttctatctacctacttaatatattgccgccgcttgctctggctcatccagggataatgcgcaacgaaatgatttaagagcgatagaaacgagtattgcggaaagtaattcaactttccgatcgacagaaatggtgttgcatgaactgtccatccggacagacaagattgggtcactgatcagcgagctgaggaaccctatggtttactcctataccgaaaagaaacgcatccgtaaggattttgggaaacgtccacaagttctggatattccttatctcctttctatccagcttgactcgttccagaagttcatcgagcaagactcggaaggccagtacggtctggaagcagcattccgttccgtatttcctatcaagagctacagcggaaactctgagctgcaatacgttagctaccgtcttggtgagccggtattcgacgttaaagaatgccagatccgcggtgtaacgtattccgcgccactgcgcgtgaaactgcgtctggtcatctacgagcgcgaagcaccggaaggtacggtcaaagacatcaaagaacaagaagtctatatgggcgaaattccgctcatgaccgaaaatggtaccttcgtgattaacggtactgagagggttatcgtatctcagcttcaccgtagtccaggcgtattcttcgacagcgataagggtaagacccactcatcgggtaaagtgctgtataacgcacgtatcatcccttaccgcggttcatggttggatttcgagtttgacccgaaagacaacctgtttgtacgtattgaccgtcgccgcaaactgccagcgaccatcattctgcgtgcactgaactacaccacagaacagatccttgacctgttctttgacaaggttatctaccagatccgcgacaacaagttgcagatggagctggtacctgagcgcctgcgcggtgaaacagcttctttcgatatcgaagctgacggcaaagtctatgttgaaaaaggccgccgcatcactgcacgtcatattcgtcagcttgaaaaagacgacattcagcgcatcgaagttcctgttgagtacatcgcagggaaagtggtcgctaaagactacatcgataccaataccggtgagctgattgtccctgcgaacatggaattgtctctggacctgctggcgaagcttagccaggccggacacaagaccatcgaaacgctgttcaccaatgatctggaccacggtgcttatatctccgagaccgtgcgcgtcgacccaaccagcgatcgcttgagcgctctggttgagatctaccgcatgatgcgtcctggtgagccgccaacgcgcgaagctgctgaaagcctgtttgagaacctgttcttctctgaagatcgttacgacctgtctgctgtaggtcgtatgaagttcaaccgttctctgctgcgtgatgaaatcgaaggttcaggcatcctgagcaaagacgacatcattcaggtcatgaaaaaactgatcgatatccgtaacggtattggcgaagtggacgacatcgaccacttgggcaaccgtcgtattcgttcagtcggcgagatggctgaaaaccagttccgcgtaggtctggttcgcgttgagcgtgcggttaaagagcgtctgtctctgggcgacctcgacaccctgatgcctcaggacatgatcaacgccaagccaatttcggcggcggtgaaagagttcttcggctcaagccagctttcacaatttatggaccagaacaacccgttgtccgagataacgcacaagcgtcgtatctctgcattgggcccgggcggtttgacccgtgaacgtgctggctttgaagttcgagacgtacacccgactcactacggtcgcgtatgtccaatcgaaacgccagaaggtccaaacatcggtctgatcaactccttgtctgtttatgcacagaccaacgagtatggtttcctcgaaacgccttaccgccgcgtgcgtgatggcatcgttaccgatgaaattaactatctgtctgctattgaagaaggcaacttcgttatcgcccaggcgaactccaacctggacgaagaaggccgcttcattgaagacctggttacctgtcgtagcaaaggcgaatcaagcctgtttagccgcgaccaggttgactatatggacgtatctacccagcaggttgtatccgttggtgcttcactgattccattcctggaacacgatgacgccaaccgtgcattgatgggtgcgaacatgcaacgtcaggctgtaccaactctgcgtgctgacaagccgttggtgggtaccggtatggaacgtgctgtagcggttgactccggcgttaccgccgttgctaaacgtggcggtattgttcagtacgtggatgcatcccgtatcgtaatccgtgttaacgaagacgagatgtacccgggcgaagcaggtatcgacatttataacctgaccaaatacacccgttctaaccagaacacctgcatcaaccagatgccgtgtgtgaatctgggtgagccaatcgagcgcggcgacgtgctggcagatggcccatcaacagacctgggcgagctggcgctgggccaaaacatgcgcgtcgcgttcatgccttggaacggttacaacttcgaagactccatcttggtgtcagagcgtgttgttcaggaagaccgattcactaccatccacatccaggaactggcgtgtgtgtctcgtgacaccaagctggggccggaagagattactgccgacatccctaacgtgggtgaagcggcactgtccaagctggatgagtcaggtatcgtttatatcggtgctgaagtgaccggtggtgacattctggtgggtaaagtgacgcctaaaggcgaaactcagctgactccagaagagaaactgctgcgcgctatcttcggtgagaaagcgtctgacgttaaagactcttctcttcgtgtaccaaacggcgtgtcaggcacgattatcgacgttcaggtctttacccgcgatggcgtggaaaaagacaaacgtgcgttggaaatcgaagacatgcagctgaagcaggctaagaaagacctgactgaagagctgcagatcctagaagcaggcctgtttgcacgtatccactcagcgctggttgctggcggtattgaagctgagaagcttgctaaactgccacgcgatcgctggttggaactgtcgctgaccgacgaagagaaacaaaatcagctggaacagctggccgagcagtacgacgagctgaagtcagagtttgagaaaaaactcgaagctaagcgtcgtaagataacccagggcgatgatctggcaccaggcgtgctgaaaatcgttaaagtgtatctggccgttaaacgtcagattcaaccgggtgacaagatggctggtcgtcacggtaacaaaggtgttatctccaagatcaacccgatcgaagatatgccttacgatgaaaacggcacgccggtagacatcgtactgaacccgctgggcgtaccatctcgtatgaacatcggtcagattctggaaacccacttgggtatggccgcgaagggcattggtgaaaaaatcaatgctatgctgaagaaacacgaagaagtttctaagctgcgcgagttcatccagaaagcgtacgatctgggcgatgacgttcgtcagaaagtcgatctgaacaccttcaccgatgacgaagtattgcgtctggctgaaaacctgaaaaaaggtatgccaatcgcgacgccagtcttcgacggtgcgaaagagactgaaatcaagcagctgcttgagatgggcggtattccgacctcaggtcagattacactgtttgacggccgtaccggcgagcaattcgagcgccaggttaccgtcggctacatgtacatgctgaaactgaaccaccttgttgatgacaagatgcacgcgcgttctaccggttcttacagcctcgttactcagcagccgctgggtggtaaggcgcagttcggtggtcagcgcttcggtgagatggaagtgtgggcacttgaagcatatggtgccgcgtataccctgcaggaaatgctgaccgtgaagtccgatgacgttaacggccgtaccaagatgtataaaaacatcgtggatggcgatcatcgtatggaaccgggcatgccggaatccttcaacgtattgttgaaagagatccgctcgctgggtatcaacatcgagctggaagacgagtaagtttgcacgaactatttcgagttgcaggaaggcggaaaacgcgcctgcaacttggaatatcgcaggaacactcgcaatcaccgtggtcacaggggtacctgcctgtttaccaatagtcaggtgcctaacaggtctaacccgacgggagccaatccgtgaaagacttactaaagtttctgaaagcgcaaactaagaccgaagagtttgatgcgatcaaaattgctctggcatcgccagacatgatccgttcttggtcttttggtgaagttaagaagccagaaaccattaactaccgtacgttcaaaccagaacgtgacggccttttctgtgcccgtattttcggaccagtaaaagattacgaatgcctgtgcggtaagtacaagcgtttgaaacatcgcggcgtgatctgcgagaagtgtggcgttgaagtgacccagaccaaagtacgccgtgagcgtatgggccacatcgagctggcttcgccaactgcgcacatctggttcctgaaatctttgccatcgcgcatcggtttgctgctggatatgcctctgcgtgacatcgaacgtgtactgtacttcgaatcctatgtggttatcgaaggcggtatgaccaacctggaacgccgtcagatcctgactgaagagcagtatctcgacgcgctggaagagtttggtgacgaattcgacgcgaagatgggtgccgaggcgattcaggccctgttgaaaaacatggacctggagcaagagtgcgagcagctgcgtgaagagctgaacgaaaccaactctgaaaccaagcgtaagaagctgaccaagcgtatcaagctgctggaagcgttcgtacagtctggcaacaagccagagtggatgatcctgaccgtgctgccggtactgccgccagacttgcgtccattggttccgttggacggtggtcgtttcgcaacgtcggatctgaacgatctgtatcgtcgcgtgatcaaccgtaacaaccgtttgaaacgcctgcttgacctggctgcgccagacatcatcgtacgtaacgaaaaacgtatgctgcaagaagcggtagatgctttgctggataacggccgtcgcggtcgtgcaattaccggctctaacaagcgtccgctgaaatctctggcagacatgattaaaggtaaacagggtcgtttccgtcagaacttgctgggtaaacgtgtcgactattcaggtcgttccgttatcaccgtaggtccatacctgcgtctgcaccagtgtggtctgccgaagaaaatggctcttgagctgttcaaaccgttcatctacggcaagcttgaactgcgtggtctcgctaccaccattaaagccgccaagaagatggttgagcgcgaagaagctgtcgtttgggatatcctggacgaagttatccgcgaacacccggtactgctgaaccgtgcaccaaccctgcaccgtttgggtatccaggcgtttgaacctgttctgatcgaaggtaaggcaatccagcttcacccgctggtttgtgcggcatataacgccgacttcgatggtgaccagatggcagtacacgttccgctgacgcttgaagctcagctggaagcgcgtgccctgatgatgtctaccaacaacatcctgtcaccagcgaacggcgagccaatcatcgttccttcacaggacgttgtattgggtctgtactacatgacccgtgactgtgttaacgccaaaggcgaaggcatggtactgacgggtccgaaggaagctgagcgtgtttaccgcgcgggtcttgcctctctgcacgcacgcgtaaaagtgcgtatcacagaagagatcaagaacaccgaaggcgaagtcactcaccgtacttcaattatcgatacgactatcggccgcgccatcctgtggatgatcgtaccaacaggtctgccgtactctatcgttaaccagcctttgggcaaaaaagctatctccaaaatgctgaacacctgttaccgcattttgggcctgaagccgaccgttatttttgctgaccagaccatgtacaccggttttgcctatgcagcacgctctggtgtgtctgtaggtatcgatgacatggtaatccctgccaagaaagcagagatcatcgatgaagcagaaaccgaagttgcagagattcaagagcagttccagtctggtctggtaaccgctggcgaacgctacaacaaggttatcgatatctgggccgcagcaaacgaacgtgttgcgaaggcaatgatggaaaacctgtctgtcgaagacgttgtcaaccgtgacggcgtgaccgagcagcaggtttccttcaacagtatctttatgatggccgactctggtgcgcgtggttcacctgcacagattcgtcagcttgccggtatgcgtggtctgatggccaagccagacggttccatcattgaaacgccaatcaccgcgaacttccgtgaaggtctgaacgtactccagtacttcatctcgacccacggtgctcgtaaaggcttggcggataccgcactgaaaacggcaaactccggttatctgacccgtcgtctggttgacgtggcacaggacctggttgttaccgaagacgactgtggtacccacgaaggtatcatgatgactccggtcatcgaaggcggcgacgttaaagagccactgcgtgagcgtgtactgggtcgtgtaacggctgaagacatcctcaagccgggtactgcggacattcttgttccgcgtaacaccctgcttcacgagaagacgtgtgatctgttagaagagaactctgtcgacagcgtgaaagtgcgttctgttgtaagttgtgaaaccgactttggtgtgtgtgcaaactgctacggtcgcgacctggcacgtggtcacatcatcaacaaaggtgaagcgatcggcgttattgcagcacagtcaatcggtgagccaggtacacagctgacgatgcgtacgttccacatcggtggtgcggcatctcgtgcggcagcagagtccagcattcaggttaaaaacaccggtacgattaagctgagcaaccacaagcacgttactaatgctaacggcaaactggttatcacttctcgtaacaccgagctgaaattgatcgacgaattcggtcgtaccaaagaaagctataaagtgccttacggctccgtaatgggtaaaggtgacggtcaggcagttaacggcggcgaaaccgtggctaactgggatccgcacaccatgccagtcatcagtgaagtgagtggtttcattcgctttaccgatatggttgataccctgaccattacccgtcagacagacgaccttaccggtttgtcttctctggtggttctggactcggcagagcgtagcaccggtggtaaagacctgcgtccagcgctgaaaatcgttgatgccaaaggcaacgacgtattgattccaggtactgatatgcctgctcaatacttcctgccaggtaaagcgattgtacagctggaagatggtactcagattcactcaggtgacaccttggcgcgtattcctcaggaatccagcggtaccaaggacatcaccggtggtctgccacgcgttgctgacctgttcgaagcgcgtcgtccgaaagagcctgcaatccttgctgaaatcagcgggatcatctccttcggtaaagagaccaaaggcaaacgtcgtctggtaatttctccgttggatggcagcgatgcttacgaagaaatgatccctaaatggcgtcagctgaacgtgttcgagggtgaagttgtggaacgtggtgacgtcgtatccgacggcccagagtctccgcacgacattctgcgtctgcgtggtgttcatgcggttacccgttacatcaccaacgaagtgcaggaagtttaccgtctgcaaggcgttaagattaacgataaacacatcgaagttatcgttcgtcagatgctgcgtaaaggcaccatcgttagcgcgggcggcaccgacttcctggaaggcgagcaggcagaaatgtctcgcgttaaaatcgctaaccgtcagctggaagctgaaggcaaaatcgcggcaacttacagccgtgacctgctgggtatcaccaaggcatccttggcgaccgagtccttcatctccgcggcatcgttccaggaaacgacgcgcgttcttaccgaagctgctgttgcaggtaaacgtgatgaactgcgcggcctgaaagagaacgtcatcgtgggccgtctgatcccagccggtaccggttacgcttatcaccaggaacgtgcacgccgtaaagctctgggcgaagtgccagttgtaccgcaagttagcgcggacgaagcaacggcaaacctggccgagctgctgaacgctggttttggtagcagcgaagattaattcttccgggtgaccaaaataaaaaccgctctttattgagcggtttttttttgcccttcatttatccttcatctttcaaaccgcagatgcgttacctgcgctcactcgcccgaatcactgacctgtgtcagctcatcgggactcggctcgcttgccgcctgcctgcaatttgaattctattggataaagcattacctaatatctgctgattaaagacttcttcctagatgctgatcccagtccttccataccggctgtaaacctgcctgcgtgagcgcctcggcgacgcgtgctggtggtcgattgtcgtgcggctcgaactgttccagctcgggtttatcatcttcggcataaccgccgggctgggttttagaacccgcgctgacggtggtgatcgctaccggaataacgtggtcgcggaaatagggggattcacgagtcgacagtgaaagctcgacgtcaggcgcaaacagcctgaaggcacaaatcagctgcaccaactgccgctcatccagtattgacgctggctcaatgccaccggcacaggggcgtaaacgcggaaacgccaccgaatagcggctctgccaatacgtctgctgcaaatagaacaggtgttcggccaccatgtagctgtcggtccgccagttgttcgagagcccaaacagcgcccccaggccaatcttgtcgattcccgcacgcccgagccggtcaggcgtctccagccgccagaagaaatcatgcttctgtccacgcaggtgatgcaacgcgtaggtgggggcatgataggtttcctgatacaccagtacgccgtcgagacccaacgttttcagctcggcgtattcgtcctgctccagcggctgcacctcaatcatcagcgaactaaaatgaccacggatggccggaaaatggcggcgaaaatagggcatcccgaccttggttttgtgctcaccggtgaccagcagcaaatgcttgaagccaagcgcattcagcgcctcgcactctttctctatctcaatctcgtccagcgttttgcgcttgatcttgttgctcatcgagaaaccacagtaggtgcattcgttcgcgcagaggttggagagatagagcggggcaaaaaagctcaccgtattgccgaagcgctgacgcgttaactgctgtgccttctgcgccataggctcgaggtagttaatggctgccggggagataagcgccataaaatcttcacggctgacgcgcggggcgttgagggcgcgctcaacgtcggccgctgttttgctgttaatgcgtagagagatgtcgtcccagtctagcgtttgccaatgctgctgaaagcccgtgccttgatagtctttcatggtccgacgctctccagaaactgcgtcagcgggctggaaggattagcgcgcgccgatttaccgcccagaccgctctcctttgctaactgccccgcctcgacggcgagcctgaacgccgtcgccatcgccaccgggttgccagcaaccgcaatggcggtattgaccagcacggcatcggcacccagttcaagcgcctcggccgcctggcttggcgcaccgataccggcatccactactaccggcaccttggtctgttcaataataatgcgcaggaactcacgcgtttgcagccctgattggaaccaatcggtgcgccaagaggcatcaccgccgcacagccgacctcttcgaggcgtttacacagcaccgggtcggcactgcaatacggcagtaccacgaagccctgtttgaccagtatttcggcggccttaagggtttctaccgcatcgggcaacaaatatttgaggtcggggtggatctcgagtttaatccagcatgtccccaacgcctcgcgggccagctgggcggcaaataccgcctcttcggccgttttcgcgcccgaagtattgggcaacaggtgcaggcctagctcttgaagcgggcgtaaaatatcgtcgccgccgcgcttgaggtcaacgcgtttcatggccatcgtcaccaactgcgtgccggaggcaacaatcgcctgctgcataaccgacgcgctggagaatttacccgttccagtaaacagtcgggaagtgaaagtcgtatcagcaatttttagcatggctcatcctccggcaatggcttgaaatacaacgacgttgtcgccgtctttcagaacgagttccgcccactgcgggcgtggaacgatgacctgattaacggcaagtgcactgccagaaagggggtgttcaaggaaagacagcagggcatcgacggtaagcggggcttcaaagcgataatcttcgtcattaacgatgactttcatcgcgtgcctccgcataccgggcagtccgccgagcgggcaagctggagcgtacgccagctttgctgcttgccgtcgaataagcgcagttttccggttaacgagctggtggcgccggccaacatcttgatagcttccagtgcctgcaatgtccctattacgccgaccaccggccccagtacgcccgcagtgcggcagttgcgggtcggtgtttctaaatcaggatacaggcagcgatagcagccgtgggaatagggcgcttcgatgaccagcagttggccgctaaagcctaccgcgctgccgctgatcagcgttttacctgcttcgatgcaggcctggttaaccgcatggcgggtctccatgttgtcgctacagtccagcaccaggtccgcgcgtgcgataatcgcctgcaaattgccagcatccagccgctcggtcagtatttcggtgtgacacagcgggttgagtttgcccaactcccgctgggcaattttcgctttgtggccgtcagtatccgcagtgcgataaagaatttgtcgctggagattggagacgtgcagcgtatcgtcatccgccagaaacagagtgccgacgccagcggcagccagatacagcgccgccggtgaacccaggccaccgaggccgacaatcagcaccgtcgaggcacggattttttcctgcccctccatgccaatatcttccagcagcagctgtcggctgtagcgcatgaattcattatcgttgagcatggttgtcgtcccgataagggcagagtttgattaattccgccgtcgccgcgcgccagtccggcgcttgggtgatagcgctgaccaccgccacgctgccgacgccgcactccatcaccggctgtacgcggtccagactaattccaccaatagcgactgtcggaaacttaccgtccaactgcttgatatgacgcgtcaattcctgcaaaccctgcggcgcagacggcatgtctttggtctgcgtcggaaacacgtggccgagggcgatatatgacggacggacgctcgcggcgcgcgccagctcggtgtcatcgtgtgtcgatacgcccaggcgcaggccggcacggtgaatagccagcaggtcggtggtatccaaatcctcttgaccgaggtgaataccgtaggcctgatgcttaaccgccagacgccagtagtcgttaataaacaaccgggcgttgtgctcgcgacccagcctgatggcctcgataatcgccggctcaacctcgtcgtcgggcaggtcttttatccgcagctgtaatgttttgacgcccgcctctagcaggcggcgtatccactcgacgctgtctaccaccggataaagcccgaggtaataaggcacctcagggaacggggtggatgggatattcatttaccgactccttcttcaatgttgtctgccggatggtacagttcgccaccgcgctcgcggaaggcttccgacatctgtgtcatgcctgactcgacgatatcaatcgggatagctttggcttccagcgcagcggcgtagtcgcgaacttcctgagtgattttcatcgagcagaattttggaccacacatcgagcagaaatgggcgaccttacccgactcctgtggcagcgtttcgtcgtgataggcgcgggccgttgcgggatcgagcgccagattgaactgatcttcccagcggaattcgaagcgtgccttcgacatcgcgttatcgcggatctgcgcgcccggatggcctttggccagatcggcagcgtgtgcggcgattttgtaggtaatcaaaccctgtttaacgtcctctttgttcggcaggccaaggtgttctttcggcgtgacgtagcacagcattgcgcaaccaaaccagccgatcatcgcggcgccaatgcctgaggtgaagtgatcataacccggtgcaatatcggtggtgagcgggccgagagtatagaacggtgcctcgtggcacttttccagctcttcggtcatgttgcggcggatcatctgcatcggtacgtggcccggaccttcgatcatcacctgcacgtcatactcccaggcaatcttggtaagctcgcccagcgtttgcagctcagcaaactgcgcttcgtcattggcgtcctgaatcgaccccggacgcaggccatcacccagcgacagcgagacatcgtaggcagcgcagatttcacaaatttcacggaagtgcagataaaggaaactctctttatggtgcgacagacaccatttcgccatgatggagccaccgcgtgacacgataccggtcaggcgtttagcggtcattggcacatagcgcagcagcacgccagcgtgaatagtaaagtaatcaacaccctgttctgcctgttccagcaaggtatcgcggaacatctcccagtttagatcttcggcgacgccgttaaccttctccagcgcctgatagattggcacggtgccaataggaaccgggctgttacgcataatccattcacgggtttcgtggatgtagcggccggttgacaggtccatcaccgtatccgcaccccaacgggtcgaccataccagtttctcgacttcttcttcgatagacgaggtgaccgccgagttcccgatgttggcgttgaccttgaccaggaaattacggccaatgatcatcggctctgattcaggatggttgatgttggcggggataatcgcgcgaccggccgcaacttcggcacggacaaactctggcgtgatgttttccggcaggtgggcgccaaagctttctcccggatgctgttgcagcagcacttcaccgcgaatacgctcacgccccatgttttcacgcagggcgatgtattccatttccggggtgataatgccctgacgtgcgtagtgcagctgagtgaccgttttccccgctttcgctttgcgcgggcgcgggagatgctcgaaacgcagatgatccaggccttcgtcggccatgcgttgctgggtaaaaccggagcttacctgcggcagctcttcggtatcctgacgcgcctcaatccagctggcgcggatcttgtccaggccgcgatgcacatcgatgttggattgaggatcgccgtaaggtccggcagtgtcataaaccgggatcgcttcattgtcttcaaactttggagcgtctttggtaccgccgatcatcgtcgggctgagctggatctcacgcattggcacctgaatatcggcgcggctaccctgcagataaatacgttttgaatttgggaaggcaacgccttgcaggctgtcgataaaagcctgggcttcggcacgctgctggcgacgattactggttttttttaccggttcattctgaagttctggggtgttcgacatagcaaattcctcgtttatcgcgaaagggaaaattgcttgtcaggaggtttacagcggaagtaaggcgttgtatttgattcttgcggcgtggtaattcctgaatcaggaagcagcgcaaagtccaaacgcaataaattactcttgttcccttcgcgggtactaacccgatcaggttccgcggatcccgaattaacggtctcagcctggcaaatctcagtacagagaggtctgcgctaggcactccgacaagaattggcctgcactttcaggccgtttaagaaacctcaatatacgaggctgattataaaacacaaccctttgcagggtttttaggcaaaactgttaagccggtcgaacaatcgctgcatcgtttgcaacaggtggcaaagccgcgattttattgtcgaaggctagcgcaataagttgatcttcaagatcaaaacgggcgtccaacgcttcgccgatatccgataacgcgtaattaaattcgaaaacgttatcatcgttgaaatcggtttcagtataactgtcatggaatgccatgatagcctcggtattggcctctagggcaggatagatttttgccgctgccacaaaaagagtctcttgggtgccatcggcttcttcaactatcctgtgataaagatggaaatgtcctgctgaaagatagtccaccagattctggcagaagttgtcgaatgctttctcattcagcggcgtgtgtttctctttattaggttttaggcccacgagagtgcagtaagaaaccaaaagttctttgcgtgcgtgcagccattgatcgattaactcattgctgccaccaacgcgttgggtcaatctttccagacgatttagcatggttgactccgtgagtaaggtaaaaaaatgtccaaaggttaaagattacttatatgtaactttgcttcccagattgtcagtgtcctcgaggttatgcaacaacaatatggaaatccaaatcacagaacagcagcgtggctggtgggtagtcagccttgaaggtaaattgtggcttccagaaggatccttacctaacggatccgcaaaggatttttcctttacaggagatattgggcgacagatcggagaatggcagggcgagccggtctggttgatccgcaagtccatgaaagacggcatgcagtcggcgcggcagctattggatagcgatcgcggactgttccaactggtaggccgtggcgttcagctgtcggagttctatcggtcccacaagttttgcggctactgcggccatgaaatgcacgtcagtaaaactgaatgggccgcgctgtgtggtcactgcaaagagcgctattacccgcagatagccccgtgcatgatagtggctattcgccgtggcaacgagatcctgcttgcccagcacgtgcgtcatcgcggcggtgtacacaccgtgttggccggttttgccgaagtcggcgagacgcttgaagagaccgtggcgcgtgaagtgatggaagagagcaatattcgcgtcaaaaacattcgctacgtgagctcgcagccgtggccgttcccaaattctttaatgatggcatttatggccgattacgacagcggtgaaatacgtcatgatcccaaagagctgctcaatgcgggttggtatcgccatgatgccctgccgctgttgcctgcagtcgggactatcgcacgtcgcctgattgaagatactgtggttctgtgccgcgcagaggaagaatcttaggcccgacgtgctacaatgtccgccttatttttaggcacctggctcttattacgtagagtcggttgcccacccgggttcgctgtacccaagaagatcagcagaatatttaaggatcttgccaagaatgaacgagttaaaaaacgatcgctacctgcgcgcactgttacgccagccagtagatatcacgccggtgtggatgatgcgtcaggctggccgctatttgccagaatataaagcgacacgtgcacaggcgggtgacttcatgtcgctgtgtaaaaatgccgaactggcctgtgaggtcactctgcagcctttgcgccgctatccgctggatgcggcgatcctgttctctgatattctgaccattccggacgctatgggccttggcctgtattttgaagcgggtgaggggccacgtttctcttctcctctgacctgccacgccgacgttgccaagctgcctattcccgatcccgagcaggagttgggctacgtgatgaacgcggtgcgcaccattcgtaaaaaccttaagggcgaagtgccgctgattggcttctctggcagcccgtggacgctggcaacctatatggttgaaggcggcagcagcaaggcgtttaccaagatcaagaagatgatgtatgccgagccagctaccctgcatctgctgcttgataagctggccgacagcgtcattctgtatctgaatgcgcagatcaaagccggtgcacagtctgtgatggtgtttgactcctggggcggcgtgctgacaggtcgtgactacattgagttctccctcaactatatgcacaagattgttgatggcctgatccgtgaaaacgacggtcgtcgtgtgccggtaacgctattcaccaagggtggcggtcagtggcttgaagccattgcggcgaccggctgtgacgcgctgggtctcgactggaccaccgacatcggtgaagctcgccgtcgcgtgggtgataaagtcgcgctgcagggcaacatggacccgtctatgctttatgcgtctcctgctcgcatcgaacaggaggtcgcaactatcttgtccagctacggtcacggcaacggccacgtctttaacctgggccacggcatccatcaggacgttccgcctgagaatgcaggcgccttcgttgaggccgtccacagcctgtcgcgtcaataccacgactaataagcaagggatcgcatgatagataccggcgcaatgcgcgaagagcagctgattaaggcacaacacatcgtgctcgaagaccctgcttcgccactgtgcccggtttatattgctggtgccgacatcgggttcgagcagggcggtgagattacccgcgccgccgtggcggtgctgcggtatccctcgctggagctggtggaataccagataggccgcattcctacgcaaattccctatatccccggttttctttcattccgtgaatgcccggcgctcatcgaagtctggcagcggctgcaacaccgcccggacctgctgatggttgacggtcagggcattgcgcatcccagacgtttaggggtcgccagccatttcggtctgatgattgatgtgcccaccatcggcgtggcgaaaagccgtctttgcgggcattttttgccgttagctgaagcggcaggctcgacgcaggccctgtgggacaaagatgagcagcttggatgggtatggcgcagtaagcttcgctgcaatccactgttcatttctccgggtaacggtatcagcatggcgtcatcgttatattgggttgaacaatgcacccgaggatatcgtcttccagagcccactcgctgggcagatgcggtggcatcaaatcggcctgcttttcagcgctggcagcgtctgagcggcatggtttaagaatcaaggcataggaggcggtcaggttttcaggtaaactcccgcccagaaaagttaacgagaaaaaaacatgttacgtaacccgattcatttacgtctagaaaagctggaaagctggcaacatctgacgtttatggcaagcctttgcgagcgtatgtaccctaactatcagacgttttgcctgcaaaccggctttggtgagccccagatttatcgcaaaattctggatctggtgtgggaaacgcttgtaattaaagatgcaaaggttaactttgactcgcagcttgagaagctggaggaggctatcccttcttcagacgattacgatatttacggcgtttatccggctattgatgcctgtatcgcgttaggtgagcttattcactcgcgtttgagcggtgaaacattagttcacgctatcgcaatcagcgaaacatccatccgcaccgttgccatgctcgagatgactctggctggcaaagaaatgaccgatgaagagctgaaagtgataccggctgttgaagaagaatgggacatccaatgggagattttccgcctgttggctgactgtgaagaacgtgacatcgaattgataaaagggttacgttctgacctgcgtgaagccgctgtgagtaacattgggataaatttaacgcaataaggcaagaaaacgtgatttaacgccttatttgtcgtatctcaaggcttcacatccgtaccctgtctggtctacatttggggtgcgtaataaaaagtggctatcggtgcgtgtatgcaggagggtgctgtcaatcggcatatccgtcgcactcgatgctttgcaaacgataaacacactgtaaaggataacttatgaacaagactcaactgattgatgtaattgctgacaaggctgatctttctaaaactcaagctaaactggctcttgaatctactctgtctgcaattaccgagtctctgaaagagggtgaagcagtacaattggttggtttcgggacttttaaagtcaatcaacgtaacgagcgcacgggtcgtaacccgcagacaggcaaagaaatcaaaatcgctgctgctaccgttcctgcgttcgtttcaggcaaagctttgaaagaagctgttaagtaattgcttgcagtgaaaagaataaacgaggggccacgctggtccctttcgtttatcaccaccggactgatggccgtcacattggccttcagtctggtcggatgcagttcccaccaggatacccctctttttagcgccagtggctacatagccgatcagggcattaaccgactgtggcgtgaggacgacagtgaacatcgtccacaaaccctcatcaacgtttacagtccctattacggtaaagacaccgtgataacccgctatgaatacgtcgacggtgagttgcatctgattaaagaaagccatgccgccgccaaagacctcggcgtgacgctgcgtttcgatcaggaaggtaacgtcagctttatgcaacgacagctggccgacgccaaagaaaaactctcggcggacgatatcgagcgctacaaatatcaggcagacaaggtcctgaatttgagtaagacgctgcgcgccgggaacgtacagctagtgcagggacgttggcgacagggcgtgattaccacctgcgcaggtgagcccgtgacgcttagcctgaatattcgctcgcaggtctggctagcgaagcgcgccgccaaggccgacgacaagctgggacttgcctggctgaccgcccggagggcaatgaactgctgctggtggcaaacgaagatttctgtctctgggaaccgaaacagggccagttaaactagccttcggcggtttccagacagtaaaaagcccgcattgcgcgggctttttctattatagagccgggattactgaccctgctcgcgggcaatcgcacgatagccgatgtctttacggcagaagctgccttcccacttgatgtcctgcgccagctgatacgcacgtttctgagcgtctgccaccgtttttcctaacgccgtcacgcagagtacgcggccgccgttggtcacaacgcgttcgtcatgcaggcgggtaccggcgtggaacactttgccgtccggtgcttcttccagcggcaagccaaggatcacttcgccgttggtgtaatcgcccgggtaaccgcccgctgccagtaccacacccagagaagggcgcgggtcccattcggaggtcacttcgttcagacgaccttccgcaccggccaggcacagctcaaccaggtcagagcgcaggcgcagcataataggctgagtttcagggtcgccaaagcggcagttgaactcgataaccttcggctgaccgtcggcggagatcatcaaaccggcatacaggaaaccggtgtagacgttgccttcagacgccatgccacgcacggttggccaaataacctggtccattacgcgctggtggatttcatcggtgacgaccggtgcgggtgaataggcacccataccgccggtgttaggaccggtatctgcatcgccaacgcgcttgtggtcctggctggtcgccatcggcaccacgttttcaccgtcaaccatcacgatgaagctcgcctcttcgccatcgaggaactcttcgataacgatgcggtgaccggcgtcgccaaaggcgttgcctgccagcatgtcgtgaaccgcagcttcagcttcttccagcgtcatcgccacgataacgcctttacctgccgccagaccgtcggctttgataactatcggcgcgcctttgctgcgcagataggcgagggccggttcaatttcggtaaagttctggtagtcggcgcttgggatagcatgacgtgccaggaaatccttggtaaacgctttagaaccttcgagctgtgcggctgcctgagttgggccaaagattttcaggccggcagcgcgaaacgcgtcaaccacgccgataaccagcggggcttctggtccgacaatcgtcaggccaatatcgtggctttgggcaaacgccagcagacccgcaacgtcggtcgcggcgatgttgacgttttccagcaagggttcaagcgcagtcccggcgttacctggggcaacgtagattttgtctgccagaggtgactgggacgctttccatgccagcgcgtgttcacgtccgccgttaccgataattaaaatattcattcagaactccaaaattagtggcggaagtgacgcataccggtgaacaccatggcgatgccatgttcgttagcggcttcaatcacttcattatcacgcatggaaccgccgggttggataacgcaggtgatgccaaccgcagcggctgcatcgataccgtcgcggaacgggaagaacgcatcagaggccatgacagaaccggcaacttccagaccttcgtcggcagctttgatcccggcgattttggcagagtaaacgcggctcatctggcctgcgccgataccgatggtcattttatcgcgtgcataaacgatagcgttagatttaacaaacttcgccaccttccagcagaacaaggcatctttcagctcttgctcgctcggctgacgggtcgtgacgacgcgtaagtcggctacgtcgaccataccgagatcgcggtcctgaaccaacaggccaccgttaacgcgcttgaagtccagcgctgtttgacgtcctttccattcgccgcagaccaatacgcgaacgttttgtttggtcgcagtcagcgccagcgcttcttcgctcactgaaggggcgatgatcacttcaacgaactgacggctgatgatggccttagcagtcgtcgcatccagctcgcggttgaaggcgatgatgccgccgaaagccgaggtcgggtcagtcttgtaggcacgctcgtaggcttcgagaacgttgccacccacggcaacgccgcaagggttcgcgtgcttgacgataacgcaggctggttcatcgaactctttaacacattccagtgccgcatcggtatcggcaatgttgttataagagagggctttgccctgcagctgtgtagaggttgctaccgatgcctcacaaaccccttcttctatatagaatgcggcctgctggtggctgttctcgccgtaacgcatatcctgcttcttgatgtagctcagattaagggtacgtgggaactggccagaaggagactcggtgtcgccgtggtatgcagggaccatggtaccgaagtagttggcaatcatgccgtcgtaggcagcggtgtgttcgaaggctttgatagccaggttgaaacgggtggccagcaggagtgaaccttcgttggcatccatctcttcaataatagaggtgtagtcgctgctcttaaccacgatagcaacgtcgttgtggttcttggccgcagagcgcaccatggtcgggccgccgatatcgatgttttcaacggcgtcttccagtgagcagtccggacgagacacggtagctgcaaacggatacaggttaacgacaaccatatcgatcggcgcgatagcatgctgacccatgatctcgtcatctttaccgcgacgacccaggatgccaccgtgcactttcgggtgcagagttttaacacgtccatccatcatttccgggaagccggtgtagtcagagacttctgtcactggcaaacccgcgtcggccagcaggcgggctgtgccaccagtggaaagcaaatccactccacgttgagagagggcttgggcgaattctacgataccggctttgtcagaaacactgagcagtgcacggcggattggacgacgttgttgcatggtggtttatcccttggctttggagtcgcaatagagagcgttacgtgaattcaatgcttgtttccctctatatatagaagaaaaacgcaggattggattcagataaggttccacagacgctgtaagcatcattattgcagatagtgtcggttaattcagacgcgcgatattgtagcgaaaacgattgcgcgatgcgcgtcaattttgagtttcgatgaacattgtggataactttgtgtgtaaatcggtataaaccccgcttttgctgtgtattgcagcgaacggtattttttattgaaattaggggttgcggctcctcagaaactccctataatgccgctccatcgacagggaacaacgcagcagcaacgcggtgtgaacgagtcggaaagaattaaaaatgatgatgaccgcgaaaataaacggttgacatcaaatgaggaaagcgtaatatacgccacctcgagttagcaagcgaaagcgcgtaactcactgctctttaacaatttatcagacaatctgtgtgggcactcacaagacgatatcagccacctcggtggcaaaaaatatcaagtcttagagtgaccaagcagtaattcattatgaatgatgtgaagtaactttgagcatcgctgaacttgtttcagcaaatcgaacttttaattgaagagtttgatcatggctcagattgaacgctggcggcaggcctaacacatgcaagtcgagcggtagcacgggagagcttgctctctgggtgacgagcggcggacgggtgagtaatgtctgggaaactgcctgatggagggggataactactggaaacggtagctaataccgcatgatgtcgcaagaccaaagtggggaccttcgggcctcacgccatcggatgtgcccagatgggattagctagtaggtggggtaatggctcacctaggcgacgatccctagctggtctgagaggatgaccagccacactggaactgagacacggtccagactcctacgggaggcagcagtggggaatattgcacaatgggcgcaagcctgatgcagccatgccgcgtgtgtgaagaaggccttagggttgtaaagcactttcagcgaggaggaaggcgttgtagttaatagctgcaacgattgacgttactcgcagaagaagcaccggctaactccgtgccagcagccgcggtaatacggagggtgcaagcgttaatcggaattactgggcgtaaagcgcacgcaggcggtttgttaagtcagatgtgaaatccccgagcttaacttgggaactgcatttgaaactggcaagctagagtcttgtagaggggggtagaattccaggtgtagcggtgaaatgcgtagagatctggaggaataccggtggcgaaggcggcccctggacaaagactgacgctcaggtgcgaaagcgtggggagcaaacaggattagataccctggtagtccacgctgtaaacgatgtcgacttggaggttgtgcccttgaggcgtggcttccggagctaacgcgttaagtcgaccgcctggggagtacggccgcaaggttaaaactcaaatgaattgacgggggcccgcacaagcggtggagcatgtggtttaattcgatgcaacgcgaagaaccttacctactcttgacatccagagaatttgctagagatagcttagtgccttcgggaactctgagacaggtgctgcatggctgtcgtcagctcgtgttgtgaaatgttgggttaagtcccgcaacgagcgcaacccttatcctttgttgccagcacgtaacggtgggaactcaaaggagactgccggtgataaaccggaggaaggtggggatgacgtcaagtcatcatggcccttacgagtagggctacacacgtgctacaatggcgtatacaaagagaagcgaactcgcgagagcaagcggacctcataaagtacgtcgtagtccggattggagtctgcaactcgactccatgaagtcggaatcgctagtaatcgtagatcagaatgctacggtgaatacgttcccgggccttgtacacaccgcccgtcacaccatgggagtgggttgcaaaagaagtaggtagcttaaccttcgggagggcgcttaccactttgtgattcatgactggggtgaagtcgtaacaaggtaaccgtaggggaacctgcggttggatcacctccttacctcaagatacgcattgtgcagtgtccacacagattgtctgatgaaaaagtaacgagcagaaatacctttataggcttgtagctcaggtggttagagcgcacccctgataagggtgaggtcggtggttcaagtccactcaggcctaccaaattctttctcatgctgcgttatgtacgcggtcgtttacccaagtaaacgtcccttgcacatgccttgcctgagaacgaattgaaactcttttcgagtgggacatataaaggtatctgttagtgactgtatggggctatagctcagctgggagagcgcctgccttgcacgcaggaggtcagcggttcgatcccgcttagctccaccatatccatacggttcacaccaatacttcagagtatattggcgacagtatactgcgaagtattttgctctttaacaatctggaacaagctgaaaaattgaaatgatacagctgaacataactctccgtagaagtactgagttatgcgcacctgtattagagtctctcaaataatcgcagcctcgaatgttgtcactctttatgagtttataagacaccttcgggttgtgaggttaagcgactaagcgtacacggtggatgcctaggcagtcagaggcgatgaagggcgtgctaatctgcgaaaagcgtcggtaaggtgatatgaaccgttatacccgacgatacccgaatggggaaacccaatgtgatacgtcacattatcgcatggtgaatacatagccatgcgaggcgaaccgggggaactgaaacatctaagtacccgaggaaaagaaatcaaccgagattcccccagtagcggcgagcgaacggggaacagcccagaacctgaatcagtttgtgtgttagtggaagcgtctggaaggtcgcacggtacagggtgatagtcccgtacacaaaagcgcatgaattgtgagttcgatgagtagggcgggacacgtgacatcctgtctgaatatgggggaccatcctccaaggctaaatactcctgactgaccgatagtgaaccagtaccgtgagggaaaggcgaaaagaaccccggcgaggggagtgaaatagaacctgaaaccgtgtacgtacaagcagtgggagcctacttgttaggtgactgcgtaccttttgtataatgggtcagcgacttatattttgtagcaaggttaaccgtataggggagccgtagggaaaccgagtcttaactgggcgtcaagttgcaaggtatagacccgaaacccggtgatctagccatgggcaggttgaaggttgggtaacactaactggaggaccgaaccgactaatgttgaaaaattagcggatgacttgtggctgggggtgaaaggccaatcaaaccgggagatagctggttctccccgaaagctatttaggtagcgcctcgtgaactcatcttcggggtagagcactgtttcgactaggggccatcccggcttaccaactcgatgcaaactccgaataccgaagaatgttatcacgggagacacacggcgggtgctaacgtccgtcgtgaagagggaaacaacccagaccgccagctaaggtcccaaagtcatggttaagtgggaaacgatgtgggaaggcatagacagccaggatgttggcttagaagcagccatcatttaaagaaagcgtaatagctcactggtcgagtcggcctgcgcggaagatgtaacggggctaaaccatgcaccgaagctgcggcagcgacgcttaggcgttgttgggtaggggagcgttctgtaagccgtagaaggtgaactgtgaggtttgctggaggtatcagaagtgcgaatgctgacataagtaacgataatgcgggtgaaaaacccgcacgccggaagaccaagggttcctgtccaacgttaatcgggcagggtgagtcgacccctaaggcgaggctgaaaagcgtagtcgatgggaaacaggttaatattcctgtacttggtgttactgcgaagggggacggagagggctaggctagccgggcgacggttgtcccggtttaagcgtgtaggggtgtagacctggtaaatccggtttactgtaaccctgaggcgtgatgacgagtcactacggtgatgaagtagttgatgccgcacttccaggaaaagcctctaagcatcaggtaacattaaatcgtaccccaaaccgacacaggtggtcaggtagagaatactcaggcgcttgagagaactcgggtgaaggaactaggcaaaatggtgccgtaacttcgggagaaggcacgctgtcgctaggtggaggaacttgcttcccgagccgaagacagtcgaagataccagctggctgcaactgtttaataaaaacacagcactgtgcaaacacgaaagtggacgtatacggtgtgacgcctgcccggtgccggaaggttaattgatggggttatccgcaaggagaagctcttgatcgaagccccggtaaacggcggccgtaactataacggtcctaaggtagcgaaattccttgtcgggtaagttccgacctgcacgaatggcgtaatgatggccaggctgtctccacccgagactcagtgaaattgaactcgctgtgaagatgcagtgtacccgcggcaagacggaaagaccccgtgaacctttactatagcttgacactgaacattgagccttgatgtgtaggataggtgggaggctttgaagcgtggacgccagtctgcgtggagccaaccttgaaataccaccctttaatgtttgatgttctaactcggccccataatctggggtgaggacagtgtctggtgggtagtttgactggggcggtctcctcctaaagagtaacggaggagcacgaaggttagctaatcacggtcggacatcgtgaggttagtgcaatggcataagctagcttgactgcgagagtgacggctcgagcaggtacgaaagtaggtcatagtgatccggtggttctgaatggaagggccatcgctcaacggataaaaggtactccggggataacaggctgataccgcccaagagttcatatcgacggcggtgtttggcacctcgatgtcggctcatcacatcctggggctgaagtaggtcccaagggtacggctgttcgccgtttaaagtggtacgcgagctgggtttagaacgtcgtgagacagttcggtccctatctgccgtgggcgttggaagattgagaggggctgctcctagtacgagaggaccggagtggacgcatcactggtgttcgggttgtcatgccaatggcattgcccggtagctaaatgcggaaaagataagcgctgaaagcatctaagcgcgaaacttgcctcaagatgagtcttccctgggacttcgagtcccctgaagggacgtttaagactaagacgttgataggctgggtgtgtaagtgcagcgatgcattgagctaaccagtactaatgacccgagaggcttaaccttacaacaccgaaggtgttttagagagacgagacgaaagtttcaagaaatcagcttgttcaaagattggttctgatggcggcctgcaggaatgtggaaagcggttggaatgaaacagaatttgcctggcggcagtagcgcggtggtcccacctgaccccatgccgaactcagaagtgaaacgccgtagcgccgatggtagtgtggggtctccccatgcgagagtagggaactgccaggcatcaaataaagtaagaaacctcagcgaaagctggggttttttgctatgtggtatttaagaaaaaaagcgtcggggcaggtcaaaagccggtcaagaacgcgaaaaagaaggcccctgtctgacgacaggggcttttttatgcgcgtttactgaccatttttaaccctttttgcctccttctaaatagctaaaactcttcatcaaacagatataaataactaaatgttatgagcatatagccttaagctgaataattttcacctaggctttacaagctcgacatagccgctgaaaaccgttatcttcgggcatctagatgtctaaacgtataagcggatgtagtgaggaagttgttatgccaattcgggttccagatgagttaccagccgtgaactttttgcgcaatgaaaacgtctttgtgatgacgtcttcacgtgcaaaaactcaagaaattcgtccattgaaagtgctgatactcaatttgatgccgaagaagatcgagacggagaatcagtttcttcgcctgctttccaattcccctttgcagattgatgttcagctgctgcgtatcgacagccgtgagtccaagaacacgcctgccgagcatttgaataacttctactgcgattttgaagatatccaacacgataattacgacgggttgatcgtgaccggtgcaccgctgggtctggtggacttctgcgacgtcgcctattggccgcagattgagcgtatcgttcattgggcaaaagaacatgtcacctcaacgctgtttgtctgctgggccgtacaggccgcgctgaacgtgctttatggcatgccgaaaatgacccgcgagaccaaactctccggcgtatatgcgcatcagacgctacagcctttggcgcttctgacccgtggatttgacgagtcattcctggcgccacactcgcgctatgcggacttcccgattgaagaactgcgcaaatacagcgatctggatattctcgccgaatcggaagatgcgggtgcttatctgttcgcgacaaaggacaagcgcatggccttcgtcaccggccatccagaatacgatgccggtacgctggcaggtgagtatctgcgtgaccttgacgcaggcctttcaccggacatgccttacaactacttccctgaagacaatgcggatctggcaccgaaagccagctggcgcagccacggccatctgttattcaccaactggttaaactactacgtctaccagataacgccattcgatcttcgccagatgaatcctacgctggaatgaactcttagcctgtctcggtaatacaagtctgaacgcccacgatcacttctccgatcgtgggcgtttttattttgttcctgccaatgccgatccttgttcgattgcaaaaattatggaaattgatcctgtttctataaaaatatttcaccgtctatttagttgaatcaaaaaggctttatttttatttaaaataaaaatggaaatcgtttttgattttatcattttcttgattacgcttaagtctatcggctagtaaataaccagtctggtcatttcaagttatgcgatctttttacgcctcggatcgtcgccgtgatcaacgcgtccagctcaggcagatgtttaatgagctcattgaaaagtcaggagaatgtagatgtcacagcagataacccgcagcccactcgactttacacgccaattttcagaacaggcatccagcattctgaccgaacccgccatcgactttttggctgatttggtaagccaattcgcccctgtacgccagcagctactgacagaaaggcgacatattcagtcggatattgatgccggtaagctgccggactttatttcggaaacgtcttccattagagatactgaatggcgcatccaaaatattcctgatgacctgctcgacaggcgagtcgaaataaccgggcctgtcgaacgtaagatggtcatcaatgcgttgaatgccaacgttaaagtcttcatggcagacttcgaggattcacttgcgcctaactggagcaaagtgattgaagggcaggttaatctgcgcgacgcggtgcgcggcaccatcagctacaccaatgaggcaggtaagatttatcaacttaaacctgacccggccgtactggtttgtcgagtcagaggattgcatttgcccgagaaacacgtgacctggcagggtgagcctatcccgggcggcctgtttgattttgcgctgtatttcttccataactatcgcgaactgctggccaaaggcagcggcccttacttctatctgcccaaaatgcagtcttacaaagaggcgcagtggtggagtcaggtattttccttcgccgaagacagcgtcgggctgccgcgcggcactatcaaggccacggtactgattgaaacattgcctgcggtattccagatggacgaaatcctttatcacctgcgcgaacatatcgtcgggctcaactgcgggcgctgggactatatatttagctatatcaaaacattaaagaacttcggcgatcgcgtcttacctgaccgccaggttgtgaccatggatcagcctttcctcagcgcctattcccgtctgcttatcaaaacctgccatcgccgaggggcgttcgcgatgggcggcatggcggcatttattccgagcaaggacccgcagcgcaacgcgtgggtgctcaataaggtgatcaaggataaggagcttgaggcggcgaacggccatgacggcacctggattgcgcatcccggcctcgccgataccgccatgtcagtattcagcaaggcactaggttcacgtcccaaccagcttgacgttacgcgtgaggaagatgcaccgatttacgccgaaactctgcttacgccatgtcagggagcgagaacagaggagggatgcgcgccaacattcgcgtcgcggtgcaatacatcgaagcatggatttcaggcaatggctgcgtgccaatctatggactgatggaggatgccgccacggcggaaatatcccgtacctcaatctggcagtggatccatcacggcaaaacgctagacgacggacaaaaggtgaccaaagagcttttccgccagctgctggcggaggagatgcaggtcattcaacaagaattaggtgaccagcggtttagctctgggcgttttcacgaagccgcagcgctgatggaaaaaatcaccacccaggatgaactgatcgacttcctcacgctgcctggctatgcgctgctggcttgataaaccctgataagaaatcggagtcaccgtcatgaaaattacccgtacccaacaaatacaacaactcgaagaatcatggtcactgccgcgctggaaagggatcactcgtccatacacggccgcagaagttattagcctgcgcggctctgtgaatcccgaatgtacgctggcgcagcatggcgcgagccgactgtgggagctgctgcacggcgggtcacgcaaaggttatgtcaactgcctcggtgcactcaccggtgggcaggcgctgcaacaggccaaggccggtattgaggcgatttatctgtctgggtggcaggttgcagccgacgccaacaccgcgtcgagcatgtatcccgatcagtctttgtatccagtgaattccgttcccgaagtggtatcacgcatcaacaatacctttcgccgggcggaccaaattcaatgggcaaacaacatcgaaccgggccagccgggttataccgactatttcttgccgattgttgccgatgcagaggccggtttcggtggcgtgctgaacgcgtttgaattgatgaaatctatgattgaagcaggcgcggcggcggtgcattttgaagaccagctggccgccgtgaagaagtgcgggcacatgggcggaaaagtattggttccgacgcaggaggcagtgcaaaagctggtttctgctcgtctggcggcagacgttttgggcgtacctactttactggtcgccaggaccgatgcggatgcggccgacctgctgacctctgactgtgatccctatgacagcgcgtttatcaccggtgaacgcacccatgaaggcttttaccgcactcatgccggtattgaacaggccatctcgcgcgggcttgcctatgcgccttatgcagacgttgtctggtgcgaaacctcgacgccggatctggcgttggcgaagcgctttgccgaggcaattcatcagcgtttcccgggaaaactgctggcctacaactgctcgccgtcgtttaactggaagaaaaacctcgatgaccagaccattgcgagcttccaggatcaactggcagcgatgggttatcagtaccagtttattactctcgccggtattcacagtatgtggttcaacatgttcgatctggcccatgcctatgcgcagggcgagggcatgaaacactacgtcgaaaaagtccagcagccggagtttgactccgtaaaacgtggctataccttcgcctcgcatcagcaagaggttggcaccggttatttcgataaggtcaccaccattattcagggcggacgctcctcggtgactgctctgaccggctcgacggaagaacagcaattttcctgagaacgcaatggcccgaatcatacgggccatttggaccccgcgtaagtcagagagcagagtgatgaagacagaactgttgattgcccaaaccattcttcagggattcgatgcacagtatgggcgctttctggaaattacttccggcgctcagcggcgttttgaacaagctgactgggctgccgttcagcaggcaatgaagcagcgtattcatctttatgatcatcatgttgggctggtggtcagccagctgaagtgtattaccggtccacgcttttatgatgcgacgttcaatgcgcgtatcaaagcctgcttcagcagcctgttgcctgattatccgcgcggtgaaattgccgaaagcttttttaattcagtctattgccgcatcttcaaacatcgtgatttagccgacgacaggctgtttgtctttagcgaacaactgccgcaaagcgctaaaccgccacagagacctctggcacgactctttgcgcctggccctagcctgcgggacatgctgcaaaaattgttaatggaactgccgctgcgcctgccgtgggaggacattacaagggacgtgcacgccattgctgatgccctgaacgtttcttttcctgacggtgagctcgacaacgcagaattcgaaatggccaacgagcttttttaccgcaacaaagcggcgtggctggtcggcaagattcgtctggccggcagggcacagcctttcctgttacctgtccatcaaagccgacagggacgactcttcgttgatacgtgcctcaccgagcaggacgatgccagcattgttttcggtttcgcccgctcctatttcatggtttatgcgccacatcccggtgcattggtcgaatggctgcgcgaaattcttccccacaagaccacggcagagctttacagcgccataggctgtcagaagcatgcgaaaacagaatgttaccgtgagcatctgcgctatatggcctcaagcaccgagccttttatcatcgctcccggcgttaaaggcatggttatgctggtatttaccctgccaggcagtgaccgcgttttcaaagtcatcaaggaccgatttgcgcccccaagcaggttaccgagcagcgagtcagggactgctaccagttggtcaaggagcatgaccgggtagggcgaatggccgatacgcaggagttcgagcattttatcctgcccaaaaatcgcatcagtgccgagttgatggccgagctacagtgcgaagccgtcaataaaatagaagatctcggcgacagcatcgcaatacgccatttatacattgaacggcgaatgagcccactaaacctctaccttgcacaggcaacgcccgagcagctgcatgacgtgatagaagagtacggtaacgcaattaagcagctggccgccgcaaatatttttccggggatatgctgtttaaaaactttggtgtgacgcgccatggtcgggtggtgttctacgactatgacgagatttgttatatgacgcaggttaatttccgtgacctgcctttgccgcgttttcccgaggaggaactggcgagcgaaccctggtacagcgtgtccgagaacgacgtcttcccggaggaatttcggcatttcttgtgcagcgacgcacgacttcggccgctatttgatgcgctgcacggcgacctgttttgccctgactattggcgcgggctgcaacagcgtattctcgcgggtcacattgaagacgtttatgcctaccgccgccgacagcggtttagcgccagaacgtcgcagaagcccaacgctgaggcgagctaatctcgccccgctttttaatgcttgccgccgccgtaggcctgggttatctctttcgccgcatggataaccagcgccccgagctcggtaacgcgatcgtcagtaatccttgaaaccggccccgaaatcgaaattgccgcgtaggcgtcattgtgttcgtcataaatacaggtcgccacgcagcgcagtcctaacgcatgttcttcatcatcaaaggcatagccgcgcttgcgggtctcggccagctcctgcttgagattcgccggtgaactgcgggtcatcggcgtgtagctgtgcagcccaattttgtgtagcagtttaacgagacgctcttcgggcagcgtggacaggaatgctttgcctgcgccagaagcatgcatcggcagcttgccaccaatgggtgccgacatccgcatcagcgcattgcactgtacctgatcgataatgatcgcctggtaatcgctgtgatcgagcaccgcgaggttcactgtctcgccagattcttccattaatcggcgcagcatgggatgaaccatggctaacaggttgcggctttgcagaaagctgctgccgaccacgaaagcgtgggagccaattgtccacagacccagatcgccaacctgacgaacgaaaccctgttgctgcatggtggtcaggagcctgtgcgttgtcgagttgggcagtccggcctgctgggccaggtcggtgagcgccacgctgccctgagcttcggcaatgtattcaagcaacttcagaccgcgggttaacgattgaacctgtccgcttgctgtgctggcactggccgttgtgcctttgccctttttagtgcgttttgctgccgtggcagaagaggtcaccatcgtgctttcccttgtcagcgtcgccactataacggcgagaaaatattattttggaattggttttcgtttttacagtatggatcgcaaacaagttttgcgctcatccgatgtgttgcatcgactctggaatgtgcctcgaggatttgatgaaaaagactcaggttgctgccggcactgggcctgagcaaggtatgctaggattattggcggattttgaagcaggttttcataaattatgattaaagtagggtgctgaagaccggccaaacgtgaaagtagcagaattttgcaagcaatgggtgatgaggtgaaagtgactaatcgagttgaagcactgcatgaacagctggcgaagcggattttagttctcgacggtggcatggggacaatgatccaaagctatcgtctggaagaagaagactatcgcggcgaacgttttgctgattgggaaagcgatctcaagggcaataacgacctgttggtgctgaccaagcccgagattattaccgccatccattacggctatctcgaggctggggcggacattctcgaaactaacaccttcaactcgacgaccatcgccatggccgactaccacatggcgtcactctcggccgagataaactatgaggcggcccgactggcgcgtatctgcgctgatgaatggactgcacgcacgccagagaaaccgcgctatgtggcgggtgtgctagggccaaccaaccgcaccgcctcgatctctcccgacgtcaacgatcctgcattccgtaacgtctccttcgatcagctggtggaagcctatcgcgaatcgacccgtgccttgatcgaaggcggcgcggatctgatcatggttgaaacgatcttcgataccctgaacgccaaagcggcgacctttgccatcgaaaccgtgtttgaagagatgggcgtcctgctgccggtgatgatttccggcacgattaccgacgcctctggtcgcacgctgtcaggccaaacgacggaagcattctataactcgctgcgccacgtcaagccgctgacctttggtctgaactgtgcacttggccccgacgagctgcgtcaatacgtcgccgagctttcccgtatcgccgaatgttacgtcaccgctcaccctaacgccggtctgcctaacgcctttggggaatacgaccttgaagccaaagaaatggctgaacacatcggcgaatgggcacgctccggcttcctcaatattgtgggcggctgctgtggtactaccccagcgcatatcgccgagatagtgctggtcctcgacggcgttgcaccacgcaaattgcccgaaattccggtcgcctgtcgtttagcgggtcttgaaccgttaacgatttctcccgagacgctgtttgttaacgtgggtgaacgtaccaacgtaacggggtcggctcgcttcaaaagattgattaaagaagaaaaatatttagaggcgctcgaggtggcccgccagcaggttgaaagcggggcgcagattattgatatcaatatggacgagggcatgttggatgccgaagcggcgatggtcaaattcctcaatttgatcgccggcgagccagacatcgcccgcgtgcccatcatgattgactcttcaaagtgggacgttatcgaaaaaggcctgaaatgcattcagggcaaaggcatcgttaactcgatttccatgaaggagggcgaagagtctttcctcaactacgcccgcaaggtgcgccgctacggtgctgccgtggtggtcatggcctttgatgaagtcggacaggcagacactcgcgcccgtaaaatcgagatttgccgtcgcgcctacaggcttttgaccgaagaggtggggtttccgccggaagatattatctttgacccgaacatctttgccgtcgcaaccggtatcgaagagcacaacaactacgccgttgacttcattgaagcctgtgccgatatcaagagcgagctgcctcatgccctgatttcgggcggggtgtccaacgtctctttctcattccgtggcaacgagccggtccgtgaggcgattcacgcggtgttcctttatcacgctattcgcaacggcatggacatgggcatcgtcaatgcgggtcagttggccatttatgatgacttaacgcccgagctgcgcgaggcggtggaggacgtcatccttaatcgtcgcgacgacggcaccgagcggcttttagatctggcagagaaatatcgcggcagcaaagacgacggtgaggcgaacaaacagcaggccgagtggcgcagctgggacgtcagaaagcgccttgaatattcgctggtgaagggcattaccgagttcattgagctcgacaccgaagaggctcgtcaactgtcgacgcgaccgattgaggtcatcgaaggtccgctgatggacggcatgaacgtggtgggtgacctgtttggtgaaggaaaaatgttcctgccgcaggtggtgaaatcagcacgcgttatgaaacaggcggtggcttatctcgagccctacatcgaggccagtaaagaaaagggcaagactaacggcaaaatcctgctggcgacggtaaaaggcgacgtgcacgacatcggcaagaacatcgtgggcgtggtgctacagtgtaataactatgaaattatcgatctgggcgtgatggtcccgaccgacaaaattctgaaaacggccatcgaagagaacgttgatatcattgggctttctggcctgattacgccgtcgcttgacgaaatggtcaacgtggcgaaagagatgcagcgccgtggtttcaccattccgttgctgattggcggggcaactacctcgaaggcgcacacggcggtcaagattgagcagaactaccaggggccgacaacctacgtacaaaatgcctcgcgctcggtcggcgtggtgtcagcgctgttgtccgacacgcaacgagatgcctttatcgaaagaacccgtagagagtacgaaaccgtgcgtattcagcatgggcgtaaaaaaccgcgcacgccgcccgtcagcctggtgaaggcgcgtgaaaacgcgaccgtgctggactgggaaagctatacgccgcctgtggtgcatcgtttgggtattcaaaaggttgaggctagcatcgagacgctgcgtaattacatcgactggacgccgttcttcatgacctggtcgctggccggtaagtatcctcgtattcttgaagatgaaattgtcggcgaagaggctaaacgcctgttcaaagatgccaacgacatgctggataaactctccaaagaacggcttctgcatccgcgcggcgtggtcggtttatttccggctaatcgagtcggcgatgacattgaaatctatagcgatgaacgtcgtgatgacgtgctggtggtcagccaccatctgcgtcagcaaaccgaaaaaaccgattttgccaactactgcctggccgattttgtcgcgccaaaaaccagcggcaaagctgactatattggcgcttttgccgtgaccggcgggctggaggaagatgcgctggccgaggcctatgacaaacagcacgatgattacaataaaatcatggtcaaggcgctgtcagaccgtctggccgaggcgtttgcagaatatcttcatgaacgagtgcgtaaggtttattggggcttcgcggctaacgaaaatctcagtaatgaagaactgattcgcgaaaattatcagggtatccgaccggcaccgggctatccggcgtgcccggaacataccgagaaaggacagatctggaagttgttgaatgtcgaggagaataccggcatgcagttgaccgaatccttcgcaatgtggccgggggcggccgtttcaggctggtatttcagccatccggaaagtaaatactttgccgtggcgcagattcaacgcgatcaggttgaggactacgcggcccgtaaagggatgccgatagccgacgtcgagcgctggttggccccaacctcggctacgacgcagattaatctcttcttctcccttctccttttaaacaggaggagggaattcctcaccctacctccacatcaatctgtaacgcatcgtagcgccaatattctaaatcacagtcaattacgcgatcctgccgatcgcggttgatccgcgtaataaacagcgccgggctacccgccgcgactttcagagcagtagacgcctgttctggcagtcgcgtcggcaccatatcaaaacgcacccgaccatatttcaccccatagcgggagaaatacaggtcagtcagggactgcgtcaggtcatcgtgaattatatcggggaagaacttcggattgaggtaatgctcaacgtagagcaccgcgcgtccatcgatgtaccgcaaacggcggatgcaataaatgtcactttgcggtggcagattgagcctctgacacagtacgtcgctgccttttatctggcttgcgtcgagcaactccgtctgggcaatgcgcccttgctcctttgccatcgcgtggaagtggctgcgctgaagcgggttatagaggatacgcggcggtgaaataaaccatccccgcctgacctcccggtaaataagtccttgcgcctcgagctgccccagagactcgcgcagagtgattcgcgtcgtggagaactcctcacttagcgttctctctgaaggcaggcgtccttcggtgcgataaaaccctgcggctatcttttcactcaatgtctggcagatagcggcaacggtagtttgcgattcactcatcagtcttcagcctcatttcagtgcatttttgcaccacaatgaccaataaaggttgaaaatttgtgcacttgttaacagctattagcttaaaaatgccgctttttcgcgctgtcatataattatcacaaacgatctttagattggcttggttcttgctggactagaccagcactcacacacactatcatctggagcatcagttatgaaacagttgttcgctactgtgttaaccaccgcgctcgttatgaccacgaccacggcgtttgccgccgagtctctggcagatctggaaaaagccgctaaagccgaaggcacggtcaacagcgtcgggatgcctgattcgtgggctaactggaaagatacctggaatgatttgaataccaaatacggcatcaaacacagtgataccgatatgagttcagctcaggagatagcgaagtttctggcggaaaaaaataacgccagtgcggatatcggcgacgtgggtgcagcattcggtccggttgcggtaaaagagggcgttacactgccgtacaagccaagcacctgggatcaggttcctgcctgggcgaaagacaaagacggaaattgggctctggcttacaccggaactatcgcgtttatcattgataaatcacaggttaaagacgagccacacagctgggccgacctgctgaagggtaaatataaagtcaccattggtgacgtgagcaccgcggcacaggccgcaaacggcgtgctggcggccacctatgcgatgggtggcaacgagaaaaacctcaagccgggtctggagtatttcgccaaactggctaaggccggtcgtctgagcctgaccgacccggttattgcctcgctggagaaaggggaagtgcaggtcggtgtggtctgggacttcaacggccttaactatcgcgaccagattgataaaacccgtttcgacgtggttatcccttcagacggcagcatcacctctggttattcaaccattattaacaaatacggcaagcatccaaacgctgcgaaatgggcgcgtgagtacatcttctctgacgcgggccaaatcaacctggcgcgtggttatgctcgtcctattcgcgcagaacatctgaccctgccggatgacgtgaaggccaagctgctgccaaacagcgaatacgccaatgcgcatccgattgccgatccggacgcctggaccaagagtgccaagacgcttccacgcctgtggcaagagcaggtcatgatcaacctccaacaataaaatcctcgtcatctcgcgtgtttgaggggcggtggcttctcagccgtttccggtcacttacttcagtaagctgccgggaaacacttggtcgccgtcttcctgacacgcgagatctctagaggattaatttcccagctttgaaattttaaataagttattgaaattaatattaattttatcagggccatacgtaatgaaaagtattctggtggtattggacggtctgaactttcaggttgcccgcgatgcaatgggttatttacaggcacagtgtgctgcgggacgcgggcgcttgtatcaactggagtgcgagctgccttcactgtcacgcccgctgtacgaatgcattctgaccggtgtgacgccggtgttaagcgggattgtgcataaccacgttgaccgtctctctaccggacagagtatttttcactacgcgcgcgatgccggtttgaccacggcggcagccgcctatcactgggtgagtgaactctataaccgcacgccgtttgaccctgcgcgtgaccgccacactgacgacaagagtctggctatccagcacgggcatttttattacgacgatgcttatccggactctcatctgtttgatgatgcagaaagtttgcgtctgaagcatcacccggacttcctgctgatccaccctatgaatattgacgatgcgggccacaagtttggcctcgattcgatgcagtatcgcaacaaggcgcgcgtggcagacggcattttgtcgcactatctcggcacctggctcgatgagggttatcaggtgattgtgaccgcggaccatggcatgaacaacgaccgtagccacggcggcattctggcagaagagcgtcaggtgccgatgttcgtctttggcagtgcttttagcctgcaacaggctgagccgctacaaacggagctgtgcggtacggtatgccagctgcttaatgtcagccacgacaaaccgcactgcgcggatttgctggcctgaaacgcgagaggttgaggataacggatgaaagctaagtggctcgcactgctgtttgtactcccttttgcggtgttctttattgcgttccagcttgcgccgctggtgtgggtcgccgtgagcagtttttacagcgatacctatgaggcgtggggattcggcaactacagcgatattttgacctcgccgttttatctccaggcgatgaaattttcgttggatatctcggtctggtcgagtttgtacggtttgctcatcgctttggttggtagttactcacttcgccagctgggcccaacaaaactgcatgatttcgtcatgtcattcaccaacatgaccagcaactttgccggtgtaccgctggcttttgccttcgtcattctgctcggtctcaacggtacgctgacgctcgtcatgcgcaaatatggcctgatgaacaccttcaatctgtactccaaagacggtctgattgtcctctatacctatttccagatcccgctcggtgttctgctgctttaccctgcctttgacggactgcgcgaagactggaaagagtctgcggcgttgctgggggcggggaaatggcgtttctggcgctacatcggcctgccggtgttggcgcccgcgttgatggggactttcgtgattctgctggcaaatgccctgggtgcctatgccacggtttatgcgttaaccaccggcaactttaacgtcgtgccggtgcgtattgcggcactggtgtcgggcgatatctctctcgacccgaatatgggcagtgcgctggcgattctgctggtgctgttaatggcggtcatcacgctggtgcatcagtggctgttgcgcaggagctatctcaatgttcgctaggacttattttttgattaaccgcagaagggggcgagctatgtcacgtgctgaaagcgtctatcatcgcctggttgtctgggtattattcatcattttggtgctgccgctggctgcaacgctgatatatgcgctggtggaagactggggagcgacgattctgccgagtggattcaccatgaagtggctgatagcgctgtggagcgacccgcgttttctggtggcgctggggcactcactgctaatctgccttgggacactgttcttctcgatggtgctcatcctgccgcttatgtttgtgattgcttactattttccaaggctcgatgccttaatgaacgtccttattttgttgccgtttgccgttcctccagtcgtctcgtccgttgggctgatggagctctattcttcaccgccgttcgaattaaccggtacgccgtggattttgatcggctgttatttcactatcgccctgccgttcatctaccgcgcgatttccaacaacattcaggcgataaatatgcgtgacctgatggatgcagcgcatctgctcggagcgagcacctggaaagccgcgttgctggtgattttgccgaatttacgcaagggggccaccattgcggtactgctgtccttctcgttcctgattggtgagtttgtattcgctaacctgctggtgggcagccgctatgaaaccctgcaggtctatctctacaatatgcgtaatggcagcggccattttaccagcgcattggtcatctcctatttcgtggtcgtcctggtcttcacctgggtggcgaacgtgttgaataaagggaaacgctgattatgtcctacctgcaagtcactcagctcaacaagcattacggccagacgcagattttcaataacatcgatttcagcgctaaagagggcgagttcgtgacgctgctcgggccaagcggctgcggaaaatcgacgctgctgcgctgtctagcgggcctgacctcggtcgatagcggaaaaattctgctacaggggcaggacattgttcccctgacgccgcaaaagcgcggcatcggcatggtgtttcagagctatgcgctgtttcctaacatgaccgtcgagggtaacgtcgccttcggcctgaagatgcaaaatatttcggccagtgagaccaaacgaagagtcgcggaggtgctgaagctggttgagctggacgagttttcgcgccgttatccgcatcagctttccggtggtcagtgtcagcgcgtggcgttggcccgttctttggtgacccagccgcgtcttctgctgctcgatgagccactttcggcgctagacgcccgtattcgcaaacatcttcgtgagcaaattcgccgtattcagcgtgaaatgaacctgactgctatcttcgtcactcacgatcaggaagaggcgctgaccatgtccgatcgcattgttttgatgaataaaggacaaatcgtacagaatggcgacgctgaaacgctgtatactgccccggttaatgccttcgcggcaggatttatcggcagctacaatctgctgaccgccgagcaggcctacgcactaaccggacagagttatccttctcaggtggccgtcaggcctgagtccatcgcgctttgcgcgccagagcagggaattccagcccgcatcatcaatcacagcctgttaggtaacgttgttcgttatcgtgtcgtggctcacaatgtcgagttatccgtggatgttttaaaccgctccgttgactctctatatattgatggcactgatattggtctacagttagatcttgataccttacgggaagttgcatgaatctggcgctgttcgatttggatgaaacgctgatcggcggtgactgttccagcctgtggtcggcctttatggtcaagcaaggctgggtcgccgatcccgacgtatttttgcagcaggacgccgagatgatgcgtctgtatgccataggtcagatggatatgaccgaatatatgaactggaccctgagcccgctcaaaggccgcaccgaggccgatgttgccgcgatggttgcgcgcttcgttaacgaagtcattgccgacagggtttacgccaaagcacgagaatgcctgagtgaccatcaggctaaaggcgatcgcacccttataatttccgcctcgggtgagcatctggtcgcgccgattgcgaagtttttgggcgtaaacgagacgctggctatcggcgtcgagaaaattaacggtgtctataccggttttactgaaggcgtgctgactttccgtgaaggaaaagtaacgcggctgatggcgctgttaaatcaggatgccagtcagctcgagcgcgcctgtttttattcggattcgcacaacgatctgccgctgcttattaaagtcgccagccctgtcgcagtgaatccggatgctatcctgctccaacacgccaggcaggcaggatggcctgtttgcgcctggcgctaaaggagctcttttttagtgttaactcttcttcatttgctttcagctatttcattactcgtatggggtacgcacattgtgcgtactggcatcatgcgtgtgtttggtgccaatttgcgccgcgttctcagcagcagtgttgaaaagaaacctctggcgtttgtttccggtatcggcgtgactgcgctggtacaaagcagcaacgcaacggcgctcctggtcacctctttcgttgcccagggactcgtggcgctctctcccgcgctggtgataattctggggccgacgtcggtaccgcgctgatggcgcgcgtgctgaccttcgacctctcgtggctttctccgctgctgatttttgttggcgtggccttcttcctaagccgcaagcagacgcgggcagggcagatggggcgcgtcgggattggtctggggctgattctgctggccctcgagctcattgtcagtgcggccacgccaatcacgcaggcgtcgggcgttaaggtactattctcgtcgctgaccggcgataccattcttgatgccctgaccggtgccgttttcgccatcatcagctactccagtctggccgcagtgctgctgaccgccacgcttgccgcgaccggcgttatctcgctcaaagtctcgctgtgtctggtgatcggtgccaacctcggcagcggtattctggcgatgatcaacgctagcaaacaaaatgcggcggggcgtcgggttgccttgggtagcctgctgttcaagctgattggctgtgtgattgtcttgccgtttatcggaccgctgacggggctgctggcgcgcattggcattcctgatgaagagctggtgatctatttccacgtgttctacaacctgattcgctgtctggcactggtgcctgcggcgggcatgatggcgcgtatttgtgagctgtggattgccgatgtccctgaggatgacccacgtctgcgtccgcgtcatctcgacgtgagtgctatcgacacgccgacgctggcgctggccaatgcggcacgcgagacgctgcgcatgggcgatgtggttgagcacatgcttatccttcagcatgaggtcatgcacggtaaaattacccaggatcgtgaagtacgccgcctcgatgatgacgtcgatgtgctttacaccgccatcaaactttatctggcgcagatccataaagaggatttgggcgaggacgattcgcgtcgttgggcggagattatcgagatggcgctcaaccttgaacaggccggcgacattatcgagcgcatgaccggcgatatcaccgccaagtcgcacgatacgcggcgtgccttctcggccgagggctgtctgagctggacaatctgcatgagaaactggtcgataacctgcgtcttagcctgtcggtattcctgtcaaacgatctgaccagcgccaagcgtctgcgtcgttccaagcatcgcttccgcctgcttgaccgccgctacgcccacgcccacgttgacaggctgcatcagcacaacgttcaaagtattgaaaccagctcgctgcaccttggtttactgggtgacatgaagcgccttaactcgctgttctgtgccgtggcgtacaacgtgctggataaggacgagaaagaagacgagcgcgaagagctcgatgatgtgccgggaatagcaaaataacgccgtgaccgccgcaaacaaaaaggccgcgatattctcgcggcctttcttttttgcccgatcggtacagattacttctgcgctaatttttcgctttttttcaccggacgacccgaccagtaaccggccaggagcgagccggagaagttatgccaaactgagaaaatcgcacccggcagggcagcaatcggcgtgaagtaaagcttgccaagcgtggccgcaaggcctgagttctgcatgccaacttcgagcgcgatggtgcggcaggtcgtctcatcaaaaccaaacagcttgccgccccagtagccgctgagcagcccgatggcgttgtgcagaataaccgctgccaccaccaccagaccgaccgaactaatcagactctggcttgcagcgataacggcactgatgatggccagaatgcagaccattgagaataccggcaggtaaggctcgatacgtttgaccgcatgagtaaacagatgatgaataatcagtcccgcgagaatagggaacacgacaatttgcagaatactcaacagcatgccttcgacatcgaccttgatgtgcgtatcgacatacaggcgggtgagcagtggggttgcaaaaacgccgaccagcgtggaaacggaggagatggtcactgacagtgccacgtcgcctttggctaaataaatcattacgttagatgcagtaccgctggcaacgcttcccaccagaatcataccggcggcgaggtcgtcaggcatgtggaaaagtttggccaacagccaggcagcaagaggcatcaccagatagtgcaggaaggttgcggcggcaaccggcgcagggcgtgaaagtacgcgtttaaaatcgccaaattccagggtaacgcccatcgcaaacataatcagcatcagcaggccgctgacgtgagggccaatcggggtaaacgtggacggcgtataataggcggcaaccgccagtaataaggcccacagcgggaacaggcgtgtgatcttggctaacatgcagggaaatcctcagcgtcttgtcattttattgtgttgttgtgtatttaatttttttattaagtaatttttaaagccaaacagttttatcttctctgtgtatttcaggcaaccctctgcggagaattaataaacatgcaggcataaaaaaagccgggctatcgacccggcttatttatctatctgctggaatcgaaaatcgattaatcctgctcgaatagattgtggtgtaacttctgcacgacctggttggcatcgtcgcccggcaccaggaagcacaggttatagctgctcgcaccgtagcaaatcatgcggatgttgaacggatccagcacgccgaagacttctttgcccacgccgcaggcctgggacagcttgttgccgatgatggcaatcaatgccagattttcctcgacctcaacgcgacacagtgaagaaagctcggtcagtaacgaggtggtcaacaggctgtcaccggaagaggttgaacctgtggtgtccagcgtcagggccacgctcacttcggaggtagtaatcaggtccaccgaaatattgtggcgcgccagaatattgaacagttcagcgaggaaaccttgcgaatgcagcatgctgaggctatgcagggttagcagggtctgcttacgacgcagcgccagcgcgcgaaacagcggcgggttttctgtggtatcgcaaaccagcgtgccgcccgcagacgggtctttactcgagccgacgaacaccggaataccgcgacgcaccgcaggcagcagggtcgctggatgcagaactttcgcgccgaaggtcgccatctcggccgcttcttcaaaggcaatgcgatcgatgcgtttagcacccggcaccagacgcggatcggtggtgtaaatgcccggaacgtcggtccagatatccacgcggctggcgtgcagcgcttcaccaagcagggcagccgtgtaatcgctgccgccgcggcccagtgtggtggtgcgaccttttggctcagcgccgataaagccctgagtgataatgagtgcttcctgtagacgaggtaatagctgctgctcggccagttccagtagaatctgggtgtctggctcagcgcggccaaagcggtcattggtgcgcatgattttgcggacgtcgaaccactctgcagacacgtggcgctggcgcaggatctcgacgaacagcagcgtcgagataatctcaccgtggctgaccagctcgtcggtcagcgcggtcgaggtagccaggcttgccgcttctgacagcgtgctgatattttccagcatgcgttcgatttcttcgcggataacgtccggttgctcgagacggtcaatgatagcggtctggatgcggcgaatttcgctcagcaggaaatcacgacgctcagtttcgcggccttctgccagttcaaccagcagattggtcacgccagcggaggcggaaaggaccaccacgcgaacgtcaggattggagagtaccacatcggcacttcggttcatggcgtcgaaatctgccacactggtgccaccaaatttggcaatgaccgtgttgttcagaggcggttggtcagcgatgcgggatgttgcttgattcatttaaaacctcgtgtcagggtcgtcattttcagacggcctttttaattgcatattccatggcacaagggtagagcgggaaacgggagcagacgtagagatgctacgatacacccagaagcgccccaccatgccaatagctcatcgagctatagcggtgacaacccagaggattcagcccctgtagtcgatcttttcccaaccgttgggtgtctgacctcggcgtcgcaccccataatgcaccttcgtcggatacggttcctccgatacattgcctgggcgacgcgcctcttctggcttacccgcgcggacgcgtataagttaggcgcctaggatcaccggttctgtgccatctgtcaacgatcgcgcggcctctgactcacattttgaatgaatgtcatctattattcagtgcggtatttgtctatcaggcgcattgccaacagttattgcctattgcaagaaacgcaagaaaaggcatctcaacttgtaaaataccggatacaatcaaggcagttgcgctaaataatagtcaagatgtcaccttacattctcagcctaagagcattgctatgaaaaatatcaatccaactcagaccgctgcctggcaagccctgcagcagcatttcgataaagttaaagatgtgaccatcagccagctgtttgctgaagatagcgatcgtttctccaaattctctgccacttttgacgatcagattcttgtcgacttctccaagaaccgcatcacctcagaaacgttggaaaaactgcaggcgcttgccaaagaaaccgagctgcaagaagccattaaatcgatgttctcaggtgagaagattaaccgcaccgaagaccgtgccgtgcttcacgttgctctgcgtaaccgcagcaacactcctatcgtggttgatggcaaagacgtcatgcctgaagtcaatgccgtgctggcgaaaatcaaaggcttcactgagcgcgttatcggcggcagctggaaaggctataccggcaaacccatcaccgacgtggtcaacatcggtatcggtggttccgacctgggtcctttcatggtgaccgaggcgctgcgtccgtataaaaatcatctgaatatgcatttcgtttctaacgttgacggcacccatattgccgaaacgctgaaaccgctgaacccggaaaccacgctgttcctggtggcctcaaaaaccttcactacccaggaaaccatgaccaacgcccacagcgcgcgtgactggttcctgaaaacggccggcgatgaccagcacgttgcaaaacacttcgccgcgttgtctaccaacggtaaagcggttgccgagtttggtatcgataccgacaacatgttcgagttctgggactgggtcggcggtcgttactctctgtggtctgcgattggcctgtcgattgccttgtctgtgggcttcgagaacttcgagcagctgctgagcggcgcgcacgcgatggacaaccacttcgctaacacgccggctgagaaaaacctgcccatcattctggcgctgatcggtatctggtataacgatttctacggcaccgaaaccgaagctatcctgccatatgaccagtatatgcaccgtttcgcggcctatttccagcagggaaatatggaatccaacggtaaatacgttgaccgcaatggttcaccggttgactaccagactggcccaatcatctggggtgagcctggtaccaacggccagcacgcgttctatcagcttatccaccagggcactaaaatcgttccttgtgactttattgcgcctgcggtgagccacaacgcgttaagcgatcaccacgccaagctgctgtctaacttcttcgcgcaaaccgaggcgctggcatttggtaaatcgctggaagtggtcgaagaagagttcgcggctcagggtaaaaaacctgaagacgttaaacacgttgcgccgttcaaggtcttcgaaggcaaccgtccgaccaactcaatcctgctgcgtgaaatcaccccgttcagcctgggtgcgctgattgcgctgtatgagcacaaaatctttactcagggcgctatcctcaatatctacaccttcgaccaatggggcgtggaattgggcaaacagctggcaaaccgtatcctgcctgagcttgaaggcagcgagaaggtcaccggccacgacagttcaaccaacggtttaatcaaccgcttcaaaaactggcgtgcctgagaagagtttagccgcagctctttctaaattgctgcgctaactgtgacgatgataggggctaaccgcttgtcggttggcccttttttattatgaaaaacgccataacaaaaaatgtctattccacatgaaacaagcgcctttcgcggccttggcgctgtggtattcttctgccattgaacaataaaagtgggatgtacatcacatggcaggatctaaaaaggcaacgatggtcgcgaccatcatgcagcgtattttaaacatttttcttttggggttagcggctattctgatgctgttcctgggcgggaaacctatcatctggcattggtgctcttcgtcaacaacgacgaatcatcttcctacatgctgattgaagggattgttatttacttcctgtatttcgaatttatcgcgctgattgttaagtactttgcgtcgggctatcacttcccgctgcgctatttcgtctacatcggcatcacggcgattattcgttttatcatcgtcgaccataagagcccgatcgatacgctgctctacaccgccgctattctggtgctggtggtgaccctctatcttgccaacggcgaacgcctgaaacgtgagtaaatcttgtccccggcgggattaccgccggggcaatctgcgttagaatgccccctgaattctttttggtagccaccgctgcccactcggagtctgtcatgtctgagtcttatgtgccttttcccgatgctatccactggtttgactacgcgtctgatgtgccgcccgaggttgtagactggctgctggagatgggttcgatgacccgccggtttgaacagcactgcgccaaggtcagcgtcaccccgcagcgggaatgcttcgtctctcgcgccgaactgactcctgaagaggcggaacaactgcctgagagcgagcgttactggctgcgtgaaattgtcctgtttggagacgacgtgccttggctgctcggcagaacgataatcccgctcgaaacccttaccggtcctgaaaacgccttggtagacttgggcacgttgccgcttgggcgctatctgtttggtggcaacgcgcttagccgcgactatatccatctggggcagcaggcgcagcactgggtccgtcgctctcgtctgcggctttccgataaaccgctgctgctgaccgagattttcctgccggcctcgccggtgtatgacgccagtaacacaaaagacctaaaatctacaacagagcagtaatgcctcaagggagaataccaagttgatggggacgatgaagcagggacaatggcgcgattattgtcgtctgatgcgaatagacaagccgatcggatcactgctgttaatgtggccgacgctatgggcactttggctggccagcgacggcacgccaccactcaagattctgattattttcgttctgggcgtattcttcatgcgtgcggcaggctgtgtcatcaacgactatgccgacagaaaagtagacggtcacgtgaagcgcaccgccggtcgcccattaccgagcggctctatcaccagcaagcaggcgaaaatgctgtttggcgggctggtgtttatctcgttctgtctggcgctgttactgaattataaaaccattctgctctcgctggtggcgttggcgttggcgtggagctatccgttcgtgaagcgggtcaaccatctgccgcaggtcgttctgggcgcggcgttcggttgggcaatcccgatggcctttatggcggtgggggagacggtgccgttgagttgctggttgctgttcctcgccaatatttgctggaccgtggcgtacgacacccagtatgccatggtggaccgtgacgatgacctgaagattggcgtcaagtcgaccgccattctgtttggtcgccacgacaacctgattatcggtctgttacagttagccacgctggctctgatggcggcggtagggcatcttaatcatctcggtgcgcctttctattggtcgctactgctggccggatgcctgttcgtgcatcagcaaaaaatcaccgcaaaacgtcagcgtgagtcgtgtttccaggcgtttcgcaataataactatgtagggatggtgatgtttatcggcatcctgctgagttacaccatgaccgcggtctaagcgccatggcatgagccaaagaaaaaccccggtcctctcacgatgaccggggtttttttatgccttaatacggagattagtggtccgtgtctctgacgtcgattttcggctctgccgggggttcggtggccgccggtaactctgaaggcatgcccgcgctctcaatcgtcagtcgaatatccggcgtgatgaggtcgctgagaatggtgtaaatctcacgggtatgttcagggatagcgtcgccaatatcattgatatagccttcatcacgcagcgtaccgaccagcgtagtaaataccgctttgtcgaagaactccggtgcgttaatgccgtgcagcaccgacagacgctgtgccatgatacggctctctttctccagcgccccacggctgatgctaggattattgctcagcagcgacagggtaatcgcatagcgttgcagcgtttcacgaacgcctgctgccaacagctgaagcggtcggctgcgcagcgggttaagcagcagttggtcatcttcgaccagaatcagttcttgacgtgccagttccgccgtgaggacttcaagtaccttagacagctgcgctttatcgtaatgcatgaagagctcggccttcatcatcgggtaaatcagctcgacctgacgcagcagttcggctttgcttacctgactatggtgcatcacgatgctggcaatcagagaaggcatgaccaacaggtgatgaatattgttgcgatagtaggtcatcagcacggcctgctcgcgaggcagaatgatgatatcgccaatattgtccttctcgacttcgaacttgttcatgttcaaggcgtggtcgagcagctggtcagcggtcaggtccggcaccgtagaatctgcggtatagggcacattgcggagcaattgcaggtagcagtcgagctgttcaatcagctgttcgcgggtcagcgatcgctgacgcgaagccagcagcgccgttgaacacaggttcatggcattggcggccgccgagttgttgatacgcaccatgatcttgtcggcgatatcctgcactgtcggcgtcagccagcttgggcgatgcgcttcgatagggtcaatcgaatcacgccattgcgggacgttctggttcagataaggcgtcaggtgcagcggctcgccgaagttgacatagccctgacccaggttgcgcagtttacgcaagccgttgatcatctgtaggaagctttctttctccttggtcgctccgcgcagctctttcgcgtaggtaccgacttccatcacgtgctcgtaaccgatgtagatagggaccagcgtgataggacgagagccgccgcgcagcatcgcctgaatcgtcatggagagcgtgccggtctttggctctaacaggcgaccggtacgcgaacgtccaccttccacgaagtattcgaccgaataaccgcggctgaacagctcgccgagatattcccggaacaccgtcgaatagagtttgttgcctttaaaggtacgacgaataaagaacgcgcccaggcggcggaagataggtccggccggccagaagttcaggttgatccctgccgcgatgtgcggaggcaccaggccttgatgatagagcacgtaagacagcagcaggtagtccatgtggctgcggtggcaaggcacataaacaatctcctgaccgtccagagccagctgacgcacacgctcggcgttatgaacgttgatccctttatacagacggttccaggtccagctcagcacgcggtcagaaaggcgaaccgcttcataattgaagtcggcggcaatctcttccattaggtcaatggcgttttgctggccttgtcgtgggagatttttttgctacgtgcttcatcttcaacggctttttcaatcgctttggaggccagtagcttgttgaacaagtcctgacgaaccggaagacggggccgactgcggccagacgctgacgcgagaaatgcatacgcgcaacgcgggcgagcttgtgggcgatggttttgtcggtaccgtgttgggtggccatatcgcgcagcgacacggtgttagagaagcgaacaaagctgtcgcggcctaaccacagcacggcaaagaatttctgaatgccgttcaacacgcgcagatgcggagtttcctgaccttcacggcccggcgcgcggccaaacatcaccgaaacaggcagcatctgaatatcaagattcggattatttcggtgcaggtccagatagtcatggaacagtttcaccgattcctgtttaggctgataataggagaaaacacgtggcccttcaccgatgaaaacgtgactcggcagttgaacgccgtctatttccagaggaatgagcgggtcgggcagattctgcgcgaggcattgtgcccgcagtgtcagaagatcggccttggagttgtacggcaaaacatacagaattggacgcgttggatctaaacgcaactccgtcacgggatctgtaggaatgaccttgcttcttaccagcaaatttagcggtaaattcagtaaggtataataaagtctacgccatcctgacataaaaaacgtaaagcctcttgttagcaattcgccgcaaggataccagaaagcaggtatgagatctgtggtgataggacaacgaattcaggctaaaatgcctaaaaatcacattaagacttaaaaataatggcaaatcaggtcactgggtttacccgaatttataaggcagccggctattctatcaagggaattaccgccgcctggaagcatgaagccgcattccgtcaggaagctatcgtcgttgtccccgccatcttactggcattttaccttgatgttagcagcatcgaacgaatattaatggttggcgcactcattttagtgctggttgttgaattactgaacagtgcggtagaagcggcaatcgaccgaattggctctgaaatacacccactttctgggcgtgcgaaggatatgggttccgctgctgtttcaatcaccattggctttgcgcttttcacctgggcagtcatcctggtgccgcactggctttgaatatttcatacttcttaatgtctgtttttgcagattcttaggttttaattccgccagtacctgtatatactcacagctggactgtataaacaaccaggggcggaatgaaagctttaacgaccagacaacaagaggtctatgaccttatacgcgatcatatttcgaccacgggtatgccgccaacacgtgcagaaattgccacccgtctgggattccgctcgcctaacgccgctgaagaacacctgaaagcgctggcacgtaaaggcgttatcgagattgtttccggcgcttctcgcggcattcgtttgctgatggaagaagaagccgggctaccgctgattggccgcgtggccgccggtgagccattactggcgactcagcatattgaagggcactatcaggttgacccaggtatgttcaaaccgagcgccgacttcctgctgcgtgtcagcggcatgtcgatgcgtgatattggtattttagacggcgaccttctggcggttcacaaaacgcaggacgtccgtaacgggcaggttgttgtcgcacgcattgacgacgaagtgaccgttaagcgtcttaaaaagcagggcaataccgtgcagctgctgcctgaaaacagcgagttcgaacctattgtggtcgatcttcgcgagcaaaactttagcattgaaggactggcggtcggcgttatccgcaacggcgactggatctaatcagcctccgcttttggcgttagccatttacacagtctcgttttgcctgtcgccccttcattggggcgatattgtttctgtcacacgaagacctgttattcataagccgttgttgtttatataatccgttaaaccacgaatcgtcatcacagcctgggctctcacaccattatgcgatcgcttttctctttgcctgctttaagaaaaacctttctaagccctgccgacaaggcgctctggcttctcgccctcccgatgatcttctccaacattaccgtgcccttgctgggtttggttgatacagcagtgattggtcatcttgatagccctgattatcttggcggtgtcgccgtcggggcaatggtcaccagcttcctatttatgctattgctcttcctgcgtatgagcaccaccggaatgaccgcgcaggcgctggggcgcggaataaccttctgctggcccgcgcgttcgtgcagccgtttttgttggcactgattgccggtacgctcattttcctgtttcgccagccgttgatttccgccgcattgcacatcgtgggcggcagtcaggcggtgctccagcaggcgcaaatattcctctcgattcgctggtatagcgcccctgcgtcgctggcgaacctagtgattctcggctggttgctcggggcccagtatgtgcgtgcgccggtcatcatgctgatagtaggcaatctgcttaacgttattcttgacctgtggctggtggtcgggttgggatggaacgtcaagggtgcggccgttgctaccgcctgctccgaatatgccacgctggctttgggactgtggctagtttccattgtgatgagaagacacggaataagtattgagctgctgaaagacgcatggcgcggcaatctgcgccagctgatcgcgcttaatcgggacattatgctgcgttccctgctggtgcagctgtgcttctcttcccttactatcatcggtgcgcgactcgggacggagatcgttgccgtcaacgccgtgctgatgaacctgctcaccttcaccgcctttgcgctcgacggctttgcctacgcggtcgaggcacattccggggaggcgtttggcgcgaaagacgagagtaagctgctgcacgtgtggcacgcggcctgtcgacaggccggactggtcgcgcttggcttcgctgtggtgtatgcgctggccggtgagcaaattgtcaatctgctcacctcaattgccgacctaagaacgctggccgaccgctatcttggctggcagattatcttaccgctggtgggcgtatggtgttatctgctcgatggcatgtttattggcgcaacgcgtggaaaagaaatgcgcaacagcatggcggtcgccgccgcaggttacgcgttgacattactggcgttacccacgctgggtaaccacgctctctggctcgccgtggcggtctttctgtcgctgcggggcgtggcgttaggctggatttggcgacgccactggcaaaaaggcacctggatttaaatgctttggattaatcctagttatgctcttaattcctgtttaagcctgaaatgctgaaattagcgactacaattagaactgttgataagcatttatcaaatgcagtaacacctaagctaaacaggagagttgattatgaataaggaccaagcagacggtaactggaagcagttcaaaggcaaagtgaaagaaaaatggggtaagctaaccgacgacgacctgactgttgttgaaggtaagcgcgatcagctggtcggcaagattcaggaaagatacggatatcagaaagagcaggctgaaaaagaggttaagtcctgggaatctgaccataaataccactggtaatcggtgactcccccgaatgtgcatcctgagaattaaagctgctcctacccaagacgcttttcaggatgcagggtacaaggaagtacccactccgttgttcaaacctatctcacccaatccccttagaaaaacgggtcagcgtttgatgaaacgttattcctgcgtcggactgaaccgcaagtaacctgctatcttcgccgcggtctgcgtatctttaggatgcgtcttgccgttcatcacgaccacttccgggaaatcaaacggagagacaccctcgaggcaggcagtattcacgccatactgggtcggatttgagcgccgttgatggtgggtgtagatcccgcaaacggagcagaaaaagtgtttcgcggtttgggtattgaagcgatattcggtcagtttttcctgaccttcagtaatggtgatatcctgcagatcggccgataccaccacggcaccgcgcatgcggcaaagcgagcaatcgcagcggcggatggtgttaaacccgtctgtcagtttcacggtgaatttaaccgcaccgcagtgacagctcgcattgaaaacgtctttcataagaactccctcagtaaaccctctgcaagacctctgatgagatcccaaagacctcaatggatgattggaataaccgttcttttaacgcttttttactgcaatagtatgatcgtgttcgcaatggtcatgactttcgcatgattcaacgatggcgcactcggcgcagagaccatgtgcttccacgacagaatggcgcagcgcaaaaccggagtctttcgccaacttgccgagtcgctcttcaatcccgtcagtggttatctctgtaaccagtccacagcggtcacagataaacagcgcggaagtgtggctaggctcttcgaaatggtggcagaccacatagctgtttgctgattcaacgcggtgaataaagccttgctcgagcaggaaatccagtgcgcggtaaaccgtaggcggtttggcctgaggctcagtttttcgcagaagatcgagcaggtcgtaggcgctgatggcgccaggttgttccgtcatcagacgcaacacttcaagccgctgcggggtaagccgaacgctacgttgctggcacaaatgctcagcttgagtgaggatattttccgtagtggttgagttcatcgcgacgtctctgcataaatagaatgctgattttatcacgcttctggacaatcgccgagagctatgccgcagttgccgttgggtctatgagatgccgaatctttgttctgtgatataatcacccatcatattccagcctttatcacgatttcggtgcttttagccgcgttatcctataaagcgttggtacgccataagcccattttcagcgaatttcaggtcgatgtcagagattaatcatccaggaaagccttccccagaatcagcgaatgctgatgcgagtccttcacgtttttccgctcagcgcttttctatcgcgccaatgctggactggaccgaccgccactgtcgtcatttccatcgcctgatgagccgcgatacgctgctgtataccgagatggtgacaactggagcgattatccatggtaaaggggattatctggcttttggtgagcaggaacatccggtttcgcttcagctgggcggcagcaatccgcaagacctggcaacctgcgccaaactggccgagcagcgtggctatgatgaaatcaatctcaacgttggctgcccgtcggatcgagtgcagaacggcatgttcggtgcctgcctgatggctcaggcctctctggttgcggactgcatcaaggcaatgcgtgacgtggtgtccattcctgtcaccgtcaagacgcgcattggcatcgacacgctggacagctacgcattcctgtgtgatttcgtgcagcaggtctccgaacgtggcgaatgcgacacctttatcattcacgcgcgcaaggcatggctgtcggggcttagcccaaaagaaaaccgtgaagtgccgccgctggattaccctcgggtctatcaactcaagcgtgattttccgcatctgacgatggcgattaacgggggattaaaagtctcgacgaagcacaagcgcatctgcagcacatggatggcgtgatgatcggacgtgaagtctatcaaaatccgtctattctgctcgacgttgaccaacgtctgtttggtcgcgaggcgtcagggttgaccgggcctgacgtgatccgcgcgctgtatccgtatattgaagccgagctctcgaaagggacctatcttggccatattactcgccatatcctcggcattttccaggggataccgggggcacgccaatggcgcagacatttaagcgagaacgcgcacaagccgggtgcaggcgttgaggtagtcgagcaggcactgtcgttggtgacacgtccgcagatggcagccagcgaagcttaagggtagcgagaattaaccaatagttagtctttctgaccacattatttcacccgccgtggcggtgggtgaaataacccattgaatatcaacgtattaaaaaaccctcttctctggcacgtttcttgatatatccctgtgttgaaagcacttcctggtgccgattttgcctgttaacgggcagattgcggcccgccattcttgcccgaggagtcatatcatgttggcagtattattcgtgctgggttttttctttatgctgttgctgaccggcatctctttactggggatggttgcggcgctggtggttgcgtttgcgctgatgatgctgggcggattgttgacgtttgttattaaaatgttgccttggctgattttggcggtggtcgcggtgtggatttatcgcgccgtaaaacagccagaaaaacctgtttataagtcacgatatagaaacagaagattaccttaagccagtcaaatggatgattaaaatataaacgtcattattttcatggatataggtgaaacgcctcaacattgtaaatgtaattgtgcaggcataacttttacttatgtgggctcgatcacaggttgagcgataaaatgctttccatgcgaattaatcatattttttaacatggcacgctgttaggatgaatgcatcgtatttacgaaaaaatttcatccgatctggtgcggccaaaaatagttgctcaagcgacatcgtccccagatttaccttgcagtaacctacaggcagtaccgttctgaactcaacgtgattgacgaaagaacagcataagagggctccttaaccggagccctctttgcatttacagacttatgaacccggaatgagcaggcttgagccggtagtggcgcggctttccagcgtctcatgggctctgcgtgcctgtgacagcgggaatttctgtgcgtctttgacatcgaccttgatggcatcgctggcaattagcgagaacagctcttcgcttgccgcagccagctcttcctgcgttgtgatatagccattcagagaagggcgggtgacaaacagtgagcctttctggttcagaatgcccaaatcgacgtccttcaccggacccgatgcattaccaaaactcaccagcaaaccgtggcgtttgaggctgtcgagcgaagccagccaggtgctcttgccaaccgaatcgtagaccactgagactttttcgccctgtgtcagctcagcgacgcgcgcagcaatatcctcagtctggtagttaatcgtggcccatgcaccggcttctttcgccagtgcggctttctcgtcagagccgacggttccaatcagttttgcccccagcgctttggcccactggctggcaataagcccaacgccaccggcggcggcatggaacaggaagatatcaccggctttgattttatgggtctggcggaataaatactgtacggtcaggcctttaaggaaggaggccgcggcctgttcaaagctgatgccctcaggcaggacagcaaccttctgcgcaggcacgttgtgatactcgctgtaggcacccagtgaagactgcgcataaactacgcgatcgccgaccttgatatggctgactccagtgcccactttggtcacgacaccagccgcctcgctgcctagcccggaaggcagcggcgcgggatagaggccgctgcgcacataggtatcgatatagttgataccaatcgccttgttctcgacctggacttcgcccgcagcgggatctttaggttcaaaatcaacatactctaaaacttccggaccgcctgttgcgctgaactggatacgcttagccattttctttcctcgttttaagtgatggatttcaccctacgctaattaatttgcctttcctagtgacggacgtgctgtgctaagaccgtttggaaatgaggcatcacaaggaattataattcggtatactgacgcgttatcagggttcacctcgaacctcacgcaagctctgccaagccagttattcatagtaggaaagcatttacccatggccggaaacaacaaaccaaccaacaaaccgaacgaaccacgcgatcgtcagatggaagggctaaagcttccgccacactctttggaggccgagcagtctgtgctgggtggcctgatgctggacaacgaacgctgggacaacgtcgccgaacgcgtggtcagcaatgacttcttcagccgtccgcatcgcctgatattcaccgagatgcagcgattgctcgagatgagtaagcctatcgaccttatcacgctgtcagagtctctcgagcagaaaggggatctggactcggtgggcggttttgcctatctggcagagctgtcaaaaaatacgccaagtgcggcaaacatcggcgcatatgccgacatcgtgcgtgaacgtgcagttgtgcgcgagatgatttctgttgctaacgaaattgccgatgcgggttacgatccgcagggccgcagcagcgaagacctgctggacctggccgagtcccgtgtctttcagattgcagaaagccgcgccaataaagatgaaggcccgaaaagcgtcgaccgcattctggaaagcaccgttgcgcgtatcgaagagctgttccaacgcccacacgacggcgtaaccggcgtgtcgaccggctatagcgatctcgacaagaaaacggctggcttgcagaagtccgacttaatcatcgtcgcagctcgtccgtcgatgggtaaaaccaccttcgccatgaacctgtgcgaaaacgccgcgatgatgcaggaaaaaccggtgcttatcttcagcctcgagatgcccggcgatcaactgatgatgcgtatgctggcctcgctgtcccgcgttgaccagacccgtatccgtaccggtcagcttgacgatgaagactgggcgcgtatttccagcaccatgggcatcctgctcgaaaaacgtaatatgtatatcgatgactcctccggcctgacgccaaccgaggtacgttcacgtgcgcgccgtatcttccgtgagcacggcggcctgagcctcatcatgattgactaccttcaactgatgcgcgtgccttctctgtctgacaaccgtaccctggaaatcgccgagatttcacgctcgctcaaggcgttggcgaaagagctgcaggtgccggtggtggcgctttctcagctgaaccgaagcctggagcagcgtgccgataagcgcccggtcaactccgacctccgtgaatctggttccatcgagcaggacgccgacttgatcatgtttatctatcgcgacgaggtctatcacgacaacagcgaagaaaaggggatcgcgcaaatcattctcggcaaacagcgtaacggtccgataggcacggttcgcctcacatttaacggtcagtggtcgcgattcgataactacggcggcccgcaatacgacgaagactaatgcttaggctggctagcgtgcttgcccctgatttcgagttaaaagaacaagctaagaccttttcatcaatttcttcataaggacacgcaatgaaggcggctacggctgtgattgatagcagcgccctgcgtcataatttacagcgcattaggcatattgcgccgcagagtcgggtggtggcagtagtaaaagcaaacgcctatgggcacgggctgcttgaggcggcgcgtagtttgcaggatgccgattgttatggcgtggcccgtttgagcgaggcgctggcgctgcgtgctggcggtattctcaagccgattttattgctggaaggttttttctccgccgaggatttacctctgctggtagcaaatggtctggatacggcggtgcacagcgttgagcagcttgaggcgctcgagcgcgcgcagctgagtgcgccgcttaaggtatggatgaaactcgacaccggcatgcaccgtttgggcgtgttgccggagaacgccgaagcgttctatcagcgtctcagccagtgcgccaatgtgattcagccggtgaatatgatgagtcacttcagctgtgcagacgagcctgaaaatgattacaccctgaagcagcttcagtgctttcaggcgtttgcccaggctaaaccgggcataaagtcgattgcggcctcgggcggtacgctgctgtggcctgcgagccatctggatctggtgcgtccaggcattatcctttatggcgtatcgccgatggccagtaccgaagcgagagaatacggttgtcgtccagcgatgacgctgacctcgagcctgatagcggtacgtgaacatcgtgcaggagagccggtgggttacggcgccacctgggtaagcccacgcgacacgcgtttaggcgtggtcgctatcgggtatggcgacggatatccgcgcagtgcgccaagcggtacacccgttttggtcaacggccgtagtgtgccgatagtcggtcgtgtctcgatggacatgctctcggttgatttaggacccaacgcgcaggaccaggttggtgacgaggcaattctatgggggcccgcgttgccggttgaacgcatcgcggctgccaccggtattagcgcctacgagctcatcaccacgcttacctcaagggtcgttcgtacctacacgggcgactaacgcttcaagggccgccccattctcagcggccctttctgtttcaggacttcttgcctgacgccagccattggccaatgatcttttgataatcgccgttagccttgctcagatgcagccactgatcgacgtacatcttccagctaatatcatccttaggcagcaggtaggccttctcgccatactgtaacggctttttagggttgactgcgcacagtttcggatagtgtttctgctggaacagcgcctccgaggcgtcggtgaccatcacgtcagcttttttgtcgactaaccgctggaagatagccagattgtcatgcgagagctcgagatgagcctgcggcagataggcgtgtacaaaggcttcgttggtgccgccggccggttcgagaaggcgtacttcaggtcggtttaattgggtaatggtctgatatttatgcgcatcttcgcagcgtaccaaagggattttgccatcctgatcgagcacgttggcaaaccaggctttctgctggcgtggcagtgtgacggaaatgccccccatggcgatatcgcaccggtttgaggtcatatcgtccatcattgttttccaggtggtttttacccagttgaccttcaccccgaggcttgcggccagtgactgcgccatggcgacgtctatcccctcatactgtccgtccgggcgtaaataggtataaggcttgtagtcaccggtggtgcaaacgttgagggagcctttctgcagcactctgtcgagatgggaagaggtgccttcagcctgcgccgcagcggttcctgctatcagcaggctaagggtcagaagcatctttttcattatttttccttgtttgataaaactgcgcatccatattcgccaaaatggcagggttaatgcaaagtaaacagaggtttgaatggaaaaaacgcccgtcacgtcataaagggaaagttcggccctaaaaaaactggtagtgtgtttatgaataaaatcgataagcaggtgagcagccatgtacagcattgatgattacgacttgaaaatcttgaccttattacaggctaacggcaggttaaccaaccaggaactcagcgaaattgtggggctgtctgcgtcccagtgttcgcgcagaagaataggcctcgaacagcaacagatgatcatgggctatcacgcccgtcttgcgcccgaggcgctggggttgggcatgattggcctgatagaaattaggttaatcaatcatttgcctgaaaatgttgaagattttcataaaatgctggagcaggtggatgcggtcatcgatgcttataaaacgaccggtgatgccgactatttgttgaaggttgcggtggcagacttagcgggtttaagcactttgataagccatattctctcagtccacaaaagcgttgcccatattaaaacctccgtggtgctgaatcgtataaaagagaatggcctgctgacgaccccggcttagcagagaatattaagccgactaccggtagcctgaagatgaaccagattggtgcaatttcactaacctggtgcattattaacgcgttttatgcacgaaaatatccacttaaaaccaaaatttgcgtgagttgagtaaaattacgatttattgtggttgatttgtgcgaaaacgattgccttcttgcgtgctgtcgttaattatctataaaaattcagcgatcccagcgggcatgcatagcccgcacggcatttttatttttataggcgacaggcattctatggataacaccgacagcatcacacagcctcgcgttgagcatacctggctcgaagacgtgctggccattcttatgggcaccctgatggtctcttttggcgtgatgatgttacgccagtcgggcgcattgaccgggagcaccgcgggcatggcatttctgattcactatctgacgcattactcctttggcgcagtgtttttcaccattaatctgccgttttactggctctcgatccgtcgcatgggctggccattcactatcaagacgttttgcgccgtggcactggtttccttattcaccagtctgcatccgctcttcatccatttcgaccatctcgagcctttttatgcggtgcttttcggtaacgttatcatgggaatgggatttatcgtgctgttccgccacaaggcgagcctgggcggcatgaatatcctctcgctgtatctgcaggacaaatacggcattcgcgccggtaaactgcagatgggcgtggatttcgtgatagtgcttgcgtcgctgtttgtggtgagtattccgatgctgatcgcctcgattcttggcgcgttcgtgctgaatctgatcatcgcgatgaaccaccgtccgggccgctatagggtttaaaaagatcacaacattaatgtgatcttgttgagcgatatttgttagtctacgtgataataaaaacagcagtaaaagtcggtgcttcgacataacagatccccttgaaccgggctctgacgcttgtccaagatacaattccaaggagaaatataccgtgttccaacatgttgatgcttatgccggtgacccaattctgtcgctgatggaaagcttcaagaacgatccgagagagaaaaaggtcaacctgagtatcggtctgtattacgacgataaagggattatcccacagcttggtgctgtcgaagccgctgaaaaccaactgaatgcgcagcctcagaccgcctcggtttatctgccgatggaaggccttgcaggctatcgcagcagcatccagaaactgttgtttggtgctgaacataccgcactgcagcagcagcgtatcgccactattcagaccgtgggtggctcgggtgcgttgaaagtgggtgctgacttcctgaagcactacttcccaaattcagaagtttgggtcagtaatccgacctgggacaaccacgtcgcgattttcgctggcgcaggtttcaaggtgcacacctatccttactttgatgccgaaaagctgggcgttaactttgccggtatgatcgataccctgcagaccctgcccgcgcaaagcatcgtgctgttgcacccttgctgccataacccgaccggttctgatttgacgcagtcccagtgggaccaggtgattgagctggtgaagcagcgtgaactcattccgttcctcgacattgcctatcagggctttggcgatggcatgaatgaagacgcctacgcgattcgcgcgatggctgctgcgggcgtgaacatgctggtcagcaactcgttctctaaaatcttctcgctgtacggcgagcgcgtgggtggactgtccgtggtctgtgaaaacagcgaagcgtcgggccgcgtgctgggtcagctgaaagcgaccgtacgtcgcaactactcaagcccgccaaactttggcgcgaaagtggttgagaccgtgctgaatgacgctgcgctgaaggcacaatggctggcagaagttgaaaccatgcgcacacgtattatcgaaatgcgtcaggtgctggtaaacagcctgaagaaagccctgccgggtcgcgatttcgactatctgctgcaacagcgtgggatgttcggctacaccggtttcagcgccgctcaggttgacagactgcgtgaagagtttggcgtgtacctgattgccagcggccgtgtttgcatggccggcctgaatcaccacaacgtggaacaggttgccgcggcgtttgctgccgtacagtaatcgctatcagtcaagataatatctcggcgtgatagtttatcacgccgtttttttttgcctttttaggcctctttgacccgcaccaccacgcgtccgcgaatctcgcctttcatcagcttttcggcagcagcgagagtctcttcaagcgttatctcctgactcacggtctcaagcagggtcgagtcaaccagttcggccagtcgcgaccatgccatcctgcgttcttctgccgggcgggtgacgctgttgatacccgccagcgtcacgttgcgcagaataaacggcgcgacgctggccgggaaatccagcccctgtgccatgccgcaggccgcgacggtgccattttctttgatgctggcgcagacattggccagcgtgtggctgcccacggaatcaatggcggcagcccaacgttctttttgcagcggcttgcctggctcactcagcgtgtggcgatcgatgatttcgctggcgcccagtttttcggtcaggtaggcggcctcatcggggcgtccggtcgaggccgtgacctgatagcctagccgcgagagcagcgcgatggcaaagctgccgacgccgccgttggctccggtaaccagcaccggtccttgctcgggcgtaaggccatttttctcaagcgcgatgatggccagcatggcggtataacccgcggtgccgataatcatgctgtcttttaggctgagtgccgcaggaaccggcgtcaggtattgggcgtcgatactgactttttgcgccagcccaccccaggctttttcgccgaatccccagccgttgagcaacactcggtcacccgtcgaaaactgcgggttgcggcttctcgctaccacacccgagaagtcgataccgggcaccatcgggaagctgcgtacaatcgggccactgccggtaatcgccagcccatccttgtagttcagcgtggaatagtgcacatcaaccagcacctcgccctcgggcaggctgctgtcatccagcgctttcagcgtggcctgatagcgatcgtcatttttctcaatcagaatggctttaaacattgtcggctccagaaggaaaggtatcggcaggcggcttgggcagcccggcaaggaaatagcggataaagttatgcaacggcatcgcattgccgttgagcttggcgcgcattaccgcgccctcccaaccggcccagaaataggcggccagcgtgtcgcagtcggcctcagtcgagagctcgccgcgttgttgcgcctgggccagacactgactcacgcgccgttcccaactttgcaggatagttatcagctgttcacggtagttcactggaagattggcgatttcctgccccagatttcctaccaggcagccgcgcgtgaaggcgtatttcgccatgccctctgcggcgtgattgacgaacgcctgaaggcgttgcagcggagtgaggctttcgtcaagcaggcttttgtccagccgatgagcaaaaaactgcgcgtagttttcgataattgcctgaccgaaggactctttactgtcgaaatagtagtagaaagagcctttaggaacgccgacctgacggaggatgccgtcgatgccggcggcggcaaagccttgttctgtgaggacagcggtaccgctgcggatcagcgtttcgcgggtgtctgcgttttcacgtccggcctttggcggacgaccacggcgtggttttaaggtgtcagtcgtcattaaacaaatatagaccgagcgtcttgttaaatcaaaagccgcttaaatgaagttatacttttaatgactttaatcaaaaaaagggggattatgtggtttcaaaaagagcttagtcttaagcagcggccgcgcggctttcatttggtcaccgaggaaatcctgcggcaggttcctgaaatcagacagctttccgttgggatttgccacgtctttattcagcatacctcggcgggattaaccattaatgaaaacgccgatccgaccgtgcggcaggatttcgaaggctatttcaatcgtgcggtgaaagaggacgagccttggtatcagcacgattacgaaggcagtgacgacatgcctgcgcatctcaagagcagtattttagggtgcagcctgagtattcctgtcactaatggcaggctgaatcttggcacctggcagggcatctatctttgcgagcatcgcaatcacggcggttcaagaaggctggtcattaccctgaatggtcattaattctgaatggcttttaaaactgttaacttgattgcagttggttgttttttgcccagatatacttcttcctctatgctcactccctgtggaaggattatcaatatgaataatgatcaactgctcgattattgtctttcaaagcccggcgctcatcaaagtaacgaaaatctttggcaggccaatcagataaaagtggcgggtgtgatgtttgccatgctgcgtgataaagaaggacatccagccatttcgttaaaaactagtcatcaaaccgccgccagtctgcgccatcaacatcccgaaattttgccaagcgattgcctcaacaaagcacactggaactgcgtcctgctggacggaaatttgccggattcccaattttataatctgatcgacagctcctatcagctggttctcgaaggcctccccgaggaaaaacggcaggaaataggcgattgacgttaaccttgggttacgcccaaacgccggtgcttaacgtcgccggtgagtattcaatgtcggttccccgccagggcagcagcgccggaaagcgccacgccgtggaaatatgcaggcaccaatagcgctcggcaccttgcagtccgtgctgagcattgtcctgccagcttatctcggtattgccctgaagatgtaatacgtcgccactgttaaaatccagaaacagcagtgcggctcgaggttctgccagcatattccccagcgtgttcatatagcgattgccgctaaaatccggcacccatagcgtatcgcccaccaattttacgaagccggggttcccgccgcgatgggacatatctgcaccgccgtttgccacatcactgtgtgcgtgagtggcaacgaaaaaggtgtcggcgctgtggataagctctcgggccgcggcgtccagcaagctcaggcgcacaatcggcccggcgtggcgctcgaccggagaaatctgcctgcgctgaatgtatttcgggcaattgccgaagctctgttgcaccgcaatctctaaccgattcttgtccatccggcttatgacgccattcacccgatttcttcgccggttggtgaaatccagccccagcgcacctagaacctgtccgcaggcgattgacgagagtgcggggcagtcctcgcggcgcggtgcattaatgcgcagatgcgaattatccaccgagctgataaacccaggtggaccattgagcacggttgcgaccggccacccgcgctcgtccagagtggcgatataaaacgaccgcaacccggcaaaaaaatcgcggtgctgctgtggcatggtgggataaataccggccgcgccaacattaaatccggccagcatttgtgcccgtttttcatcagcatggaagatatccatcatggcaccttaggcttttgccggttcgggtaagggcagtggaggcgtagagaagaagcccggtaactgctcgatgcgcttcagccattgtttgatggaaggataggcttctagcgaaataccgccctccggcgcgagcgcgatatagctgtaacaggccagatcggcaatcgtaggcgcttgctctgaggcaaggaactgacgcggtgacagatgttgctcaagctgcggcaagaatttttccgccaccttaagcgcggactgataatcctctttggtgccaaactgggcgataagccgcgccgacgccggaccatagcgcacctcaccggcagccttgcacagccactgttgggtgtgcgccgcgccaagtgcgtcctgcggcagccagtggctgtcaggcgcgtaagttttcgctaaataaaccaggatagcgttactgtcgctaatcaccgtctcgccgtccaccaggaccgggatctgtccccatggattcatggcctgaaacgcttcgctggcgcgcacgtcggcacccgcttctatagagtcatgcggcaggttcaacatttttagcagtagcgcaacgcggtgcgtgtggcctgagagcggggtgccataaagcgttattctgttcattgatttctccggtgttgattcagatttgctgtagccagattactcttgcaatcgatgaatgaaatccggttatattgaaattgataatttcgaaaagtggaacaatcaatggatcgtctcgacgagctggctatttttctcgaggtgttgcagcacggtagcctggcggcggcggcaagaaagctgcgtcgttcggctcccgcggttacgcgcgcgattgcctcgctggaacagcgattcggcgcacggctggtggagcgcacgacgcgacgtctggcaccgacggaggcaggtttacggcttgccgagcgcgcggcggtggtcttgagcgcctataatgatgcggtgcaggataccgtgtcggcgcagcttaaagggttgctgcgtatcaccgcgccggtgctgttcggacgccgccatgtcgcgccgctggtcatggagtttcaggcgctgcatcccgagatccagatcgagctgatcctcaacgatcgtaacctcgagatgattgaccaggggatcgacgtcgccgttcgcattggcaacctggctgattcgtccaaggtcgcgaggcgtctcggggaagtcagcgtggtggtggtcgccagccctgaatacctggagtaccaaacgccggtctgccatccggctgatttggcggcgcatcaaatcattctcagcagcaatgatgcctttaatgaatggcgctttgggccgcacgaagagggaccccgtgtcaggctttcgccgcatttgctgttcaatgacgttgaaacccgaaggctggcggtgatagccggaaagggaattgccagactcctgtcgtatcaggtcgccgatgagctggctaacggcacgctggtgcgactgctgccggaatttgaaccgctgccgctgccggttcaactggtggtgcagaatatccagcgtatgccgataaaagtcagagctttttgggacttttcgcgagaaaaattgagccaactgccacagattcattcctcaaggagtgaatgacccggcggtagacacgtcaaactctcttcatgagatcataaaaaaagcgagcctaaaggctcgctttttcattgacgtcaacctatcgatcaggctgattttttggctttgtgcgtatgacgctcaagcagcggtttcaggaaacgggcggtgtgcgattctttgcactccgcgaccgtttctggtgtgccggagaccagaatctgtccgccgccgtggccaccttcagggccgagatcgacaatccagtctgcggttttaatcacatcaagattgtgctcaatcaccacgatggtgttgccctgatcgcgtagctgatgcagcacctcgagcagttgctggatatcggcgaaatgcagaccggtagtcggttcgtcgagaatatacagcgtctggccggttccgcgtttagacagctcacgcgccagtttgaccctctgcgcttcaccgccggacagcgtggttgccgactgacccagacggatgtacgaaagacccacgtccatcagcgtttgcagcttgcgcgccagcgccggaacggcatcgaagaaatcacgcgcttcttcgatggtcatgtccagcgtctcgtgaatactcttgcctttgtacttaatctcaagcgtttcacggttatagcgttttcctttgcactgatcgcaaggcacgtagatgtccggcaggaagtgcatctcgaccttaatcacgccatcgccctgacaggcttcgcagcgcccacccttgacgttaaagctgaaccgccccggcgtgtagccgcgcgaacgcgactcgggaacaccggcgaacagctcgcgcaccggagtaaagatgccggtgtaggtcgcagggttagaacgcggcgtgcgaccgatagggctttggtcaatatcgataaccttatcgaaatgctcaagtccctgaatgtcgcgataaggcgcggcttcggcgatggttgcgccgtttaactgacgctgcgccagtgggaacagcgtgtcgttaatcaacgtcgatttacccgagccggacacaccggtaatgcaggtaaacaggccaaccggcagcgttagggtgacgtctttcaggttgttgcccgttgcgccaatcagtttcagcaccttcgccgcatcagcgggaacgcgctgttctggcacggagatttcacgtttgccgctgaggtattgcccggtcagggagtcctctttagccataatatcttctgcggtaccttctgccactacctgaccgccgtgcacgcccgcaccgggaccgatatcgatgatatggtcggcggcgcggatggcgtcttcgtcgtgttcgaccacgataaccgtgttaccgaggtcgcgcaggtgaatcagcgtctcgagcaggcgctcgttatcacgctgatgcaggccgatggaaggttcgtccagcacgtacatgaccccgaccagaccggcaccaatctgactcgccagacggatacgctgcgcctcaccgccagatagcgtttccgctgaacgtgacagagagaggtagttgagtccgacgttgaccagaaacttcaggcgatcgccgatttccttgaggatcttctcggcaatctgcttacgctgaccgctgagattcatgctcaggaagaactccattgcgtgaccgatgctgaagtcggagatttcaggcagcgtagtctcttcaacgaacacgttacgtgcttcttcgcgcaggcgcgtgcccttacaggacgcacaggggcgattgctgatgtatttcgccagctcttcacgcaccgcgctggactccgtctctttatagcgacgttccatattgtgcagcacgccttcaaacggatggcggcggaccgaggtatccccacggtcattaatatatttgaattcgatggtctgcttgcctgagccgtgcatgatggcgtgaaccacgtcctcgctcagcgcgttaaaggaagattccacgtcaaatttgtagtgctcgccgagtgagcgcagcatctggaaatagtaaaagttacgacggtcccagccgcgaatcgcaccaccggccagtgaaagctcggggttctgaataacgcgttcaggatcgaagaactgctgtacccccagcccgtcacaggttggacatgcacccgccgggttgttgaacgagaacatccgcggttcaagctcacgcatgctgtatccacagaccgggcaggcaaagttggccgagaacagcatttcatcggcgttagggtcgtccatgtcggcaaccacggcggtaccgccggagagttccagtgccgtttcaaaggattcggccagacgctgggcgagatcgtcgcgcactttaaagcgatcgaccaccacctcgatgctgtgttttttctggagctcaagcttgggtggatcggaaagatcgcaaacttcaccgtcgatacgggcgcggatataaccctgcgccgccaggttttccagcgtcttggtgtgttcccctttgcgatctttgacgatcggcgcgagcagcatcagacgctgaccttccggctgtgccagcacgttatcgaccatctggctcacggtctgtgccgctagcggaaccccgtgatcgggacagcgcggctcaccgacgcgggcaaacagaagacgaaggtagtcgtggatctcggtaatggtaccgaccgtagaacgcgggttgtgcgaagttgatttttgctcgattgaaatcgccggtgacaacccttcaatgtggtcgacgtccggtttttccatcagagacaaaaattggcgtgcataggctgaaagcgactcgacatagcgacgctgaccttcggcatacagggtgtcaaaagccagtgaggacttgccagatccggataatccggtgacaacgatcagtttgtcgcgcggaataatcaggttgatattcttgagattatgggtgcgtgcgccccgaacttctatcttatccattcatcattcccggaataacttgaaagctcaccgtgccggtgactgtccgtgatgcgcgtgaggatgtgcatacccgttctgcgattgattcgggtatatccgccccagtcactgcatctgaatcagaaaattgggcacagaaagtacgaaacgaacaagtatgacacaaaaaaacctgaatggatatccagtgcctggctgcaaaattgttggctctgtaaacatttctggaatcggtattgtaggtgttatctggaatccgcccatgctaaaattcatggtttatactgtataaaattaactcatcaggagagtcgacatggccagcagaggcgtaaacaaagtgattctggttgggaatctgggtcaggatcccgaagtccgctatatgcctaacggcggtgctgttgccaatatcaccctggcaacttctgaaagctggcgcgacaaggcgaccggcgagcagaaagagaaaactgaatggcaccgcgttgtgttgttcggcaaactcgcagaagtcgcgggcgaatacctgcgtaaaggctctcaggtttatattgaaggcgcactgcaaacccgtaagtggaccgatcaggccggtgttgaaaaatacaccaccgaaatcgtggtaaacgttggtggcaccatgcagatgctgggtggtcgtgctggcggcggtgctccagcaggcggcggtcaggcttcaggcggccagcagggcggatggggtcaacctcagcagccacagggcggcaaccagttcagcggcggtcagcagtctcgtcctgcggcacagaacaatgcgcctgcgcaaagcaacgaacccccaatggatttcgacgacgatatcccgttctaagaattattcttccacgaacgcacgttctgaaagtagccgcgacggataccctgagtctggcaaacatcaagaacactgaccccgcctaggcggggttttttttgcgtcggcgttgcatcatctcctttttcgcgcggataatggccgtaaaagggactttccacccagcgggaataaaatatgaaacaggcggtcagaggttttgattttcgtcgcattatggacgataaagcccaactgaatcagttcgttctggatgagcaacagcgtcaggtaattcaaagcctgcatgcgttgggtaagacgctcaacgcccccaaaaaagccgcaaaagggatttttggtctcggcggcaagaaaaccggcggcgtttatatctggggaaagtggggcgcggcaagagtttcatcgtcgacagcttttttgctgccgcacccgttagcagcaagatgcgtgtgcacttccatgattttttgcgagacctgcatcggcaaatgaatgcccctcaggccgctgataatacgctggaaaccgcccttggtacgctgctcggtgactgccgcttgctgtgcttcgatgagctacaccttcacgacgttggcgatgcgatgctagtaaaagggctgcttgcctgggtcatcagtagtggcactgtcctcgtggcgacctcgaactatccgccagagcagcttctctcgcatccgctttatcacgcgcgtttcgtgccttcgataaaactcatcgaaaagcatctcgaggtggtggcgctcggggaactcaggactatcgccaactgggcagcaatgatctcacgccgttctgtgaaggggtttttctgtgtcctggtaatgaccttcagcgccgcgaatgtgggcttccgcagccgggcatcgggaggcaatccttaaatatggggtcgcgtactctcgagctactctctgcgccgggcgactttctgcatttttcctttgaggcgctgtgcgttgcgcccaccgcagtgatggattatctggcgctttgcgatcgctgtgattgctggataatagaaggggtgccgaagctcgccggccagtcgggtgctacgcagcaacgctttatcaacgttattgacgtgctttacgagcggcaatgtcgattgtatttattgagtgaatacgggatggatgagatgacccgggacgttgaacaagaggatattcaacgaacccgcagccgcctccgccagcttaaaaattacgtttagatagagaagaagatagcggcggcgatgccagcaaagacaatccatttaatgatgtaatagccggtgcgattccacgccttgaggcgcttaccgaccttacgaatcgaataaatgtgcttgaagactttgtttacgccgccggtgcgatcgttctcgtcgtttggcgcggtcgccgcgctcatcaggttcttgcccagccagtgattgatgctctgtgcccagcgataacgcattggtcgctcaatatcacaaaacagaatcaaccgattttcaccgctctggttttcggcatagtgcagatacgtttcatcaaacatcacgccttcgccgtcacgccaactgtagcgctcgccatcaacctcgataaagcagcgatcgtcattgggggtaataagtcccagatgataacgcaacgatcccgcgtacgggtcacggtgccggggtaaacgactgccgtgaggaagttcggcgaacatagccgctttcaccgaaggcagactgcgcaggagtgccgtcgtatgcgggcataaatccatcgcggaaggatggctgtcgtcataccatttcagataaaaacgtttccaaccggttttaaagaacgagttaaatccggcgtcgttaaacttatcggacgctttaatctgctgaatttccatcagccgttggccttcatcacgaatggcctcccagttttctctcaacactctgagttccgggaattgttcgggctgcaaataggggtcgtcggggcacgggagaacaggtacataaagacgttcatcggtgcggtaaaagtagaatgatcggaaagctgtcgccagaagttatagcgaacctttccacggtagtgcacatagataacgcataaaatgaataaaataagaatgatgtatttcattattgaatcacttcaaatttaggccaatgttctgtgtaacctcggatacacaaccccgatattcccctctggctgaaaaaatggcgtctgccaatccggaatcttttttaactcacttcccttaacacaattgaatcatcaacaaaataagagcaaagcccttacaaagagtagacaaaaaaggcgaattcataggataaaaaaaaccacctgccgaaagggccaggtggtctcgactgcgggtgtcaaaatattattatttgaagacttccgcattcgcttcgaagttaggtccatgctctctggccgcgatgatgacgtagtatttaccgccttttttatcggcttcgtcagaaagttttttatgcaaatcagaggggatgagacttccccagaagttgcacctacgctaatttttcccacatagtgatatttaaagtgatgagcttcatctttagagatcagctcagcagcagacgcggttaaagaaaacagcgaaagagcgacagcagcagtgacgagaatttttttcatttattcacccttttaaatatgattaaacacatttgcacaaatgtgtatattgaatgtaatcaaagatgacgttttatccatccaacggggaacctgacggccttttagttagaactgtgttccagatctcatttttgtatgttttttgaacgcgattgcatcaacatccgctaaggaaagacgcaaaaaatgctcgaaactctcacgttaacgcattatctggtactgggtgtcacgctgctggtggcctacgttatttttgggattgcgggtttcgggtcagccttggtcgctagcccggtgatggcgctctatatcccgctggcggacattgttcccttgctggcgctgctcgacctttgtgccgcagtggtcaatgtcagccgtgacggacgcaatgcgcagtggcccgagttaaaacggctgattccgctgatggtcatgggcagtctgattggggcggcgattttgctcagggcgcggcccgatatccttctgctggcgttgggcctatttgtggtgttctacgccctgtattcgcttagcggactcaagccgcagcgcaccttttcaccgaaggcggcggtgccttttgggttggtcggcggcgtatttagtgcactttttggcagcggcggatttatttacgccatttatctcggcggccgtattgagaaaaaagacgcatttcgtatcacacaaaccacgcttattggcttgagcacgttaacgcgggtcgttatttttgcgctggcgggagtttatcttgatgccaacctgtggctgttggcgctgattctcctgccgggtatgctgctggggataacactcggccgccatctcacgctcagaatgtcgcgtgagcagtttctcaagcttatcaaccttatcctgctcgcctcgggcagcatgcttatcttgcgctatttaagctgagagagccggactatggctggctattgagcatctcgaatcgtgcccctttgacgacgatttcatcgaactgcagatgatgcataaactctctcaatataagcagcgttgcggcgaaatcgttaccttcaggaatgccttcaaagtgcgcggggcggccattgatcaccagcgcgaggcggtcgaaggtccgctcgacggcgtccagtgagagcgacatctgctcgttttctgcgacgccagcgaggcgagcgatcgcgcgaatatcgttatcttggctatgaagactcgccccggcgtgatgtcgtggcgcaggcctgtcacctcgtcttcaacgaccatgatggcgttttccatctcggcgggcgtcggggctggtgtctgaaatagcctaacgaggtgagctgtgagcccagcgttaaccgatgcgtcttgccgtcgatcgtgacctgtgtttcttcactgccaatatgcaaaagaaccgctgaaggagactgcgtcatactgttttcgcctcgaaaaggataactcgttaaaacgatgagtgatgccttaacttacccccgattcgccgcctgacgcaatcctgcctagtcctcaataaatcgcagattcttttttgcgcgctgatcgacctcaaggctaaaaatatccggccttgaatagtgcccgaccgggtcgaaatcatagcgggcgcccaccaggtcgtcggtattgatttccgcggtcaacaggccggtttctcccttcagcggtccggccagcacgtcgcccaacggacccacaatcaccgaacccccgttaatcaccggccggttagtttcccagtgcgccacctcgattccctgctgtgcaggtgagggctgatattggcaggcgcttaccacgaacattcggccttcgtgagcgatgtggcgcatcgagcattgccagatttctcgctcgtctaccgtcggagcgcaccagacctcaacgcccttaccatacattgccacgcgcagcagaggcatgtgattttcccagcaaattgcgctgccgagacggcctgcggcggcgttcaccacgggcagcgtcgaaccatcaccctgtccccagatcaaccgttcggtgccggttggcatcagcttgcggtgcctggcaaccaccccctgagccggttcgataaacagcgaagtacagtagagcgttgaaccgctgcgttcaatcacgccgattacgatgctagcctgggtgcgggttgcgaggtctgccagcgcctgcgtttcctcaccggggacctcaatggcgttattgtagtaacgggtaaaatcttcacggccttcgggcaggcgatagcccagacgggtgccaaagatctcgcctttcggatagcccccaatagcgcttccggcatgacgaccaggcgggcaccagaggcagtaatctccgtctcccaggacaaaatattttccagcgtagcggcttttccctgtggggaagagcctatttgcagggcagcaacgattgaagcaggcataaatttctctcgactcagcggggatgaatttctattctgctcgaatcctgacattaatccatgcccatccatttatgagtgatattgatagaattaatatcgagacggtcgatctcaacctgcttaaagtcctcgaggccttatatgaagagggcagtgcgagccgcgccgccgtgcggcttgggctgacgcagtcggcggtgagcgccgcgcttggccgtcttcgccgcctgtatgacgatcacctgtttgtgcgcaccggacgcgggcttgcgccgacgctgcgcgccaatgagctgaaaccgctggtcagcgaggcgctggataaatgtcggcagagtttgctgctggtttctggcgcgcgggccggctatgcgggtcggtcgttgagcatcggactctcggatgactttgagctcgcgttgggcaagcgtctgattgaccggcttgaacgcgacatgccggggctgcgggtggtcttccgtcagactcacagccgcatcgtggaagagatgctgatgaatcgcgaaatcgatgtcgcgattgcctcaggaggattcacctcggcggctatcggcagtgaaacattgggagaagggcgctatgcctgtctgattgatgtgactcagccgctggcagagcatgaagtcgagcatcaacatcacctgacgctggcggctttcttaagccgtcggcatctgctggtctcatcgggcgggtttataggcatggtggatgaggtacttatcccgcaggggcttaagcggacggtgatggcatcaacaacccatttctcggccttgccttatctgctgctgggcagcccggcgttggcgaccattcctttgcacgccgcccgtcaactggcggcgtttcatcccttgcgattattgctgccgccggtcgccatgccggcctactcaattaatcttggctggcggcgtgatgcgctgcgcgacccggcggtgatgaaattgaaagagatcgtcagcgatacgctctcgtctttcgactggcagagtgaatcatttgacgatgcctgattagctcagcgcgggtttcgtttttttccattccgacagccagcgcggacgatagaacatcaccagattaccgagcaggataagccccaacccaatcaccgcgttggtatgccattgataaccttcatagaaggtcgataccgtcagcgcgacgagtggaaacagtagcgtactgtaggcggcctggcttgcgccgatacgtcctaccaggctgaaatacatcccgaatccgagcaccgagccaaataccgccagatagaccagcgagccgacgtaggcggatgtccattcgatggcaaaggacgctccctgtgccaggctcagcaacgccatcacagcagcaccgtatcccatcgcgtaggtattggtgctaaccacgtccagtccgtgctttttgtggcgcgtactgatcatattgcccaacgagaaaccgtaggtgcccagcatgctaagacctatgcctttcaacaactcaggcgcaacgtgattcgcgctaaggtcgtgccaaaacagggtaacaatgcctaccagacccagaatcgatgccggaatcaacgccggtgacattttctgacggaagaaaagcatgccgttgaaggcgttaaacagcactgacatcgagaaaatcaccgattccagcccgctgctgatataggccgccgcgtggtagaaacaatagaagttgaaggcaaaaacgcagcagccttgtgccacgcaataaatgtggtctttcaacgccagcttgcgcaaacggcgagcaatcaatagcactaccatcatcagcagcgaggcgagcaaaaagcggtagaaaatggagactgttacggccactacaccctgttgcaggtagatggcaaaccaggtagtgccccaaatcaggatcacggagatatacagcaatgcgttcataatggtatccagcgctaaaaaaaagaattctgcgtggattatcgaccctcaataagatttgggcattcatgggcttgcggtcagttgtatattcttgcggtttttttaaagtgatagtgcagtcaatactcgccctcaacgcggggaaaacactacaatagcgctattcattcaccgggaagccgcgccatgccaaatcgttatcaggccttcgaaacgctccagaagcaccatgccgtgttgcacgataccgtgcatctggggtcgggtatgcagctggccgcgtggtcgaataaaaacgactgcgtgacgcaggaagacccggatcaccatacgctcagcctgtatatcgccgacggctacgagtgctaccacaaaacgcgttcaggctggcaaaacggtggcgggccggatcgcttctgtctgatgccgaaacacaacgtctcgagctgggacgtgcggggcgacttgtcgtttgtacatatgtattgcaccgacgaacatctgcgccaggtcatagaacagacctgggaccgtagcccggcgagtattctggtcgatgaactcacgttcgaagaagatcagcatattactcagctttatcgtcactttctgctcagttgccagtggcaggaaagcagcaatcagctgatgcttagtacggccaccaatctactggtgacgcatctggtgcgccactatacccatttgcagtgggcgctgccgaccgtgcgtggcggtctgtcgccgacggtgctgaaccgcgtgaaggaatatattcacggccatctgtcgacgccgctacagttgcagcagttggccgagattgctgggctaagtgagtatcattttgcgcggatgtttaagcagtcgatgggcgttgcgccacaccagtacgtcatgaacgcgcgtattatccgcgccgagaatttattgcgtaatacccgtctggatatcactactatcgcgttggactgtgggttcagttcaaccagccatttcagcaaccgctttaagtcgctgcgcggcgtcgcgccttctgccgttcgccagaaccttttgcgctaacgtattcctcgcgctatttctcaaaataactttcccaccatcccattagccgacattcggtgctaggttattcctgtcggattactgagggttatcactactatgctcaacgctgcaccacaaatagaaacgccaagattgattctgcgcggccacaccgttgatgatttcaacgtcatcgcggcgctgtgggccgatcctgaaattgtccgctttatcggtggcacgccctccacgcgcgaggcgagctggacccggcttttacgctatgtcggccattggcaactgctgggttttggctattgggtggtgaaagaaaaagagtctggccgcttcatcggcgagatcgggcttgccgactttcagcgaaatatgcagccttctctggagaataaggcggagatgggttgggtattaagcccagaatttcacggcaaaggctacgccagcgaggcggcaaaagccgtactcgattgggccgccgcgcacctcgagcgtcccgtttgctgcatcattgctccggaaaatacgccgtcaatccggctggccgagaagcatggatttattcatcagattgatacgacttatcaagacagtcccgttcgcttgtatagccgtcccggcaccgaaaaataggcagcgcagtatgctggtggagaagacagactatgttgaaaatattaggcaaatcgacgtcaattaatgtgcgtaaagtgctctggacctgccatgagctggggttggattaccgccatgaagagtacggcggcgatttcaaatcgacgcaaacggcagagtttaaggcgttgaacccgaattctttggtgccggtcattattgatgatgaatatgttctgtgggaatccaacactatctgccgctatttggtggctaaagaggggcgagacgatctcttaccgccaacgccgcgtgaaagagcgaaggtagagcagtggatggactggcagctcggcgatctgaataatgcctggcgctatgcctttatgtctcttgcgcgtcaaagcccgcagcatcaggacccggcattgctcgcaatcagcatcgcagaatggaatagattaatggagattgttgacggtcaattacagcaggcgggagactatatattgggtgaccgctttacgctggccgacatagtgattggcatgtcggtaaatcgctgggtgatgacgccaatcactcgccctacgctttctgccgttttttcgtactatgagcgcttgaatcaacgcgaaggttatcaattatttggtcgtaacggcagcgtatagcgcaaaaatgcccccttttattaagcgagggggcagtcgtatcaggacgaatattattacttaaagtcgaccatcatcaattcaggaattgaaagaccctgcgtggtgctgacgcatttatcgatataacgcgtaaatgccatagggcgcggaatgcccatgtccaataaacgctgattatcgaacttaacgtttaattctgcaaagccgccgtataatttaattgcgcgcagaataatcttgtcattgcaggggccaagaatatctttaaattgtttccgaattcctgtgaactcttgataactaatttgctgataatcgttaacaattgctgaggtgttatttgctttggcgacagattcatcgatagcagaaaaaggcgtacacatctcttcacccgaagaaatatggtagaagttatgtttaacttcttcgctcaggcaaagattcgccagcaccatggcacaatagtctactggaataacgtcaattttatcgtcaagctgacaggtaaatttcttcagcttgagcgccatcaggaatacccagaaaatgctgctcgatggacggcatccgtactgagtatgaccgacgataatggagggacgtgccaccacaaaaggcaggtccgggcagtgttcgcggatcagattttcgatagcgcgtttggaggcggtgtactgcaccaggtcctcattgtgcgcattatcgggcatatcttcatagaaaacgctgtctttgtccggcattgacgccatggcggtgccaacgtgaacaaagcgctgtaggctttttacttttgccatccgctgagcaaaagctaaagagccgtcgacgttaacgcgccacagcgccgggttatttccgaaggaggcaattgcagcacagttaataacgtgcgtgacattatcgatacgtgggtcctgagtaaatgcttcaggctcggacaggtcaccgattaaaatattttcttcattaatagaagtaagctgctgcgaatttaaaccaaatttttctaaattggttcttattctcaataaaccggcagccgttgtttcagcgcggactaataacagcaggttgatttcgttttttggatactgacgtaaaaaatgttcgacaacggcaccacccacgaagccggaggcgcctgtaattagaatgcttggcataagtagaatctcagcaggttacagtggctgcacagtaccacctgcttcttaaaccattcttatactaaattctgggtaacataaacggaagctaaacggcttaggggcttttttaaacagtcctttgaatcttaatttgtcattagttttcgttttaatttcgtttaaaaaaggaagcaattcatcgctattaataatacctccgctaactatttttaaaagacccatcccattttttgccacaggcatcccacttttcattcttgatcctgcgtcctttgcgctgagataaatggataaactagcgtagggttccgcgctaccctcaaagatctctgtctggaaagtatgcagtgaggtatgactaagataaactgaggcataggccacctaacaggatggcgacagagcacggttaaaggaattttgtgcggggtgattccctcgcgcgcataaataaggtacaaggctgcatgaaaatcccaaatagaatccaacctctggtggatgacggcctaatcgatgacgtggtccgtcgactgaaaagtggcaaagaagccgacgtgtacaccgttttatgcggtgaggaaattcgttgcgccaaggtttataaggaagcaacgcagcgtagctttaagcaggccgttcagtatcaggaagggcgcaaggttcgtaacagccgcagcgcacgtgcgatgcaaaaaggctccaagtttgggcgcaagcagcaggaagaaacttggcagacggccgaagttgacgcgctgtttcgtttggcaaacgccggcgtgcgggtcccgcaaccttatatctgcctcgacggtgtgctactgatggagcttattaccgacggtgaagggctggtagcaccgcgtttgagcgacgttatatttaccgagcaggaggcgattgaggggcatgacatcatgatccgcaacatcgtccgcatgctttgcgctggtatcgtgcatggtgacctctcggagttcaacgtgctgcttgacgcacaggggccggttatcattgacttgccgcaggccgttgatgcctcagccaataaccatgccgaatctatgttcgagcgtgacgtgaacaacatgaccgatttctacgggcaattcgcgccagcgctgctggaaacgcgctatgcgaaagagatctgggcgctgtatgaagagggtaaattgaccccggaaagcgtgctgaccggccaatttgccgaagacacgcacaaggctgacgtggactctctgctcgatgaaattactgccgcagaagacgagtactatgaccgtcagcgtgcgctgaaagagagggactaatccctctcggtaaatccttcccgcgttaagtacccctgcgccgctgtcgagagcaaaaaatctgacagcggttctgctcgtgcgtggcattgcgcaaaggcataatccgctcgaatattataatcctcaggtatttcaatcacccgcagaccgtcacactctgcgagccgacgcgcgtaactcacatagccgatgaaaagctcgcactgtccggtgcggataagccacgccgcggccagctcgcccgctggtacgggctggctctcggcgccgccgaccagtggcaaagccgactgacgcagcctttcgcccatgccggggtgacgcctctctatcttttcaaacagctgccaggtgtagtcacccgaagggtcggcaagcggcgtcgaggtgccgagccgcagcccggggtcattcagcaacgctaaccatgaggggtgttcggttacccgattttcatgcaccgtcagacaaagcctgttgccggtaaaggtctcaacgcgctgagcacggccgagcgccagcaggcgctgcggatgtgatacgttggctgaggcgaacagatcaggctgttctcccgcttcaatgcgctggcgcagcagcccggcgggccaaactgcgtcgagacccctatcccgctctgtcgggtaaaatgtgccattaaaggcggccaaacggctctcaggctgcccgcagccagaacgttgagctgccgggtcatcaggctttaggctcggctggcgcgggtttaggcgcgacatagtcagtgcgatagaaacgctgatagtaggcattggcctgtttctgcatatcgatatcgctgaatttttgcggatagagttttttcgccatccacagctcaccgatggccagcgcttcgggcattggataaccccaggccttggcatattccggcatcagataaacgcggtgatgctttacggcgtcaatgacctgccagttagggtcgcgttcgatatcacccaccacctgcggatagcggtcctgtacaaaaatcacctgcgggttccaggcgatgacctgctccatactcacctgtttaaagcctttcaccgtggattcagccacgttaagtgcgcccgcgtgattcatcatcaggccagtgtatttgccggagccataggtcgtgaggtcagggtttgccatataaacgcggacgcgttggtcgggtgcaacgtccttcaggcggctgctcaccagagttcgctgggcaaaggtgtaatcgataagcgcgtcagcctgcttctggcgattcaccacctcaccaatcagcctgataccggtttttagcccgtcgttgtaggcctgctcctcgtcgttaatctgcggattcattttgcccgcttctccaggcctgtcgtcgcgcagcgaaatagccactaccgcgatgcctgcgttgctaatctggtcaatcatctcctttggcgcatagtttgtgacgaagacgacctgcggatgcagcgcaaccaggctctccacatcgacgtgcgtcaaatcgcccagcgcaggtgttgttagcagctgcggtgcgaggcgcacatagctgtcgcccaactgttgtttccagtttgccagcacgccaacaatcttgctgctggcgtcgagctgcacgagaagattaagcgtctgatgctgaagtacgacaactctgtcgacctgatcgggaatcgttatctgacggccaagctggtcggtgatttgtcgtgaggcgatcgcgccaaaggatgacatgctcagcaccgcgccgagcatcaggatgttgaaagtattcgacctggatagcgaaaattttagaaaagtgtgcacagggaaaacctcgttatacgttgtatttcccagtatatagcggtgtgccttaactgaacatctcgacgattatttacgcccttcaatcagcatgcgcaccgcaaggccgctgagtacggtcgccatcagccagcgttgcaccagggtccaaaacggacgccctgccaggaatgccgcgatataaccggccgagagtgcaatcagcgcattgacgcagaaactcacggcaatctgcgtgctgcccagcaccatcgactgcatcagaacgtgaccctgcgcaggcacgataaactgcggtaaaagagagagatacagcacggcggccttggggttaagcaggttagtaaaaagccccatggtgaagagtttacgcgggctgtctttggcgagttcacgcacctgaaacggcgaacgaccgccggggcggatagcctgccacgccatatacagcagataaagtgcgccgcagaatcgcagggtgtcataggcaaacggcacggccattaacagggcagtgataccgagtgcggagaaaaccatataaaacaggaagccgaccacgacgccgccgagtgagataagtccggcccttgggccttgacagagagagcgtgaaatcaggtaaatcatgttcggcccaggggtgagcaccattccgagggcgattaacataaaaggcagcaaatgagcggcatcaggcatgacattctccgagtatgattgacgaaaaaatctcctacaagatatagagcttttaagggttattaagcaaggggttgtcatattttgttcacggcttttgggtcaaacagtcataaacccgtgcaatgttactttccgtgtgagttaaacctttaccggagaggacatgtacgtcgatacccgaaaactgatttcactgcaaaacccgtcagtgctgattgtggcccaccggggcgtatggacccgcgcaccggaaaactcgctgtctgcgctcgaagacgcgattgccgcaggcgctgacatcatcgaaattgatacccagagtactgcggactctcagctggtggtcgtgcacgacgccaggctggaccgaacctctgaccatcagggcgaaattcagcgtatgcccttctctgaagtgcgccgtgcgcgactcaagggcagcgacggacgccccggcatggtggtgactgaagatcgtgtgccttctctggaagcttttctcgaggaggcacgtggccggatcgtggtgaatattgatatcaaatttgcccgcgatcgccagcgcgtgatagacctggtgctcaacatgaacatggccgacggcgtgctgcttaaaagcaagattgagctcaatgcacagtccttcccgctggacatgactgacgcccggcgacgtattccctacatgccgattgtgcacgccagacccggaaagtttgccgaagatttgcgcaagatagaagactttggcgcgcagatgatggcgctttattttagcgatttgcacgacgtcatcgaggcgcgagaggagctgcaacggttgggcattcgcctatgggtgaacacgctggatgtctctcactcgctggactactgtgatagccacgcccatcagcatccgacgcaggtctggggcacgttggttgacgctggatttggcgcaattcagactgataacgtcagtcaactgcgccgttggttaaaggacaaaggacgctaacaatgaaaaacgagatttctgacaggctgcgcatcgccagccaaattgctgcacaggccgccgaactggcgctgagcttctttgcgcgacgcagcgagattgatgtcagcagcaaacgcacccaggactttgtttcagaagccgatgtcgcggttgaaaactttatccgccagcagctgcaacagcatttccccaacgacccgattattggtgaagagatgggcggccagctgagcgaaggcgcgtgctgggtgattgaccccatcgacggcacgtctaactttttacgcggttcgccgctttggggcgtttcattaggactggtcgagcggcatcgtccggtgattgggatagtcgcgctgccggtgcttaacgaactttttgccgcagagaccggtaagggcatcttccttaacggcaaagcttttacgcgcgataaccggttctctgacgttcaggtcgtttctctgggcgatagcgcagacgatcagcttggtgaggcgtcggcattttatcggggtctgcgtgaggcagactggtcggtacactgctatcgctgtaccaccgtgggtatggtgtttgcggcgaaaggtattctcgacggccacctgcaacgccgcaccacgctgtgggacatcgctggtggcgcggtgctgtgtcaggaagccgggctggaaacggtggtaaatttcggtggggaagggattcgtcacctgtcggtggcgacggggacacccgcgctcatggacgcggtcaggccactttggcccgacctgtcacctcgttaagcgaagtaaaaccaggcggtctcaatgagaccgtctttcacctcgaataccgccatgctttcgataggttgttcgttcagaccgtggatcctttccagatcaaagaccttgttgcccaatacgctacgcgatatgagttcggctttcagtgcggggttgttaaatcggttttgggcgtaaaactcgcgcagctgctgcttgccctgcatggaaggcgcggtggcaggcatacgatacgcaataaaggtttcgctaaaacaggaaacgaatttttccaggtcgtgctgattgtaagcgtaaaattgttgttctacggcggctaaaacgtcggacatggtgttaatcccttttagattgcgaataaaacgcgcgtttataatttgaatttaaattcacatttaatgaatttaaattcaaacatgaggcattgtccgaaacttgtcaatcgttgatgtaatcttttattaccgcaggttagcgtctcttcagtagtctatagttaacaatcaattagtatgactactctggagtgtatgcatgataatccttcaccacctcaataactcgcgttcccaacgcattttgtggatgcttgaagaactgcaactgccgtacaccatcgaacgctatcagcgtgacgaaaaaacgatgctggccccggcatcgcttaagaagatccatccgctgggcaagtcgccggtgttgcaggatggcgatcttatcatcgctgaatcgggtgctatcctcgaatatttacaggaaacctacgatcttcagggtcttctcaagccagcggatccttcgtcgcgtttgcagtatcgttactggatgcactatgccgaaggatcgctgatgccgctgctggtaatgaaacttatcttcgggcgtcttggcaaaccgcccatgccgtggttgatccgcccgatagccggggcgataggtaaaggcgtgcagcagaattacatcgacaaacagctggcgacgcatgccgcctacattgaagatcacttgactaaaaatgcctggtttgccggtgaaaccttcagcgccgcagatattcagatgagctttccaatcgaggcgctggcctcgcgttttcccaccgataaaaccccgcacctgaaacagtggctggctaagattcaggcaagaccggcctatcaacaggcgttaaaacagggtgggccttatcaaataggatcctgagtaaaaattgatcgactcgctttttttagattaaatgtctttaaaatgtacaaaaatgacaaaaacatcgctaaacggagttgaaaccagagtattaatagctggataatcgtttgcttagccgtacctacgacttttagaaccgccgtacgcgatgtgagttaaacgtttgccctggctttttgctgataattcaacggtgtttatcatcgttgaacgtctgcgcacatcctttagccgggtagggaagcgaacgacacgaaacgatttcataatgaccacgcaggcatttcagtagcacactcagaggatccaccatgtctcaaccacagtctcaagcgggcggcagcgtgacgcctaaaggatcgcttgatgctttcttttctatttctgcgcgtggcagtaacgttcgccaggaagtgatcgccggtctcaccacctttttagccatggtctattccgtgatagtcgtgccttcgatgctcggcaaagccggtttttctgcggcggcggtgttcgttgcaacctgcctggtggccggatttggctctctgctgatggggctgtgggcaaacctgccgctggcgattggttgtgctatctccctgacggcgtttaccgcgtttagcctggttattggccagcacatccccgtgccggtggcgctcgggcggtattcctgatgggcgtgctgtttaccgttatctcggtgaccggcattcgctcctggattttgcgcaatctgccgaccggtgttgcgcacggtacgggataggcatcggcctgttcctactgctggtggcggctaacggcgtggggctggttatcaagaatccgctcgacggcctgcctgtggcgctcggcgcttttacctcattcccggtggtgatgacgctgctcgggctggcggtgatttttggtctggagaaactgcgtgtgccgggtggcattttgctggtgattatcgccatttccgtgattggcctgattttcgatccggcggtgaaatatcacggcctgtttgcgatgccttcactgtctgacgcgagcggtcattcgttgttctttaatcttgatattaaagacgcgctgaaagccgccgtgttaccgagcgtgctggcgctggtgatgaccgcggtgttcgacgccacgggcaccattcgcgcagtagcggggcaggctaacctgttggataaagacggccagattatcaacgctggcagggcactgacggcggactcggtgagcagcattttcgccggtctggtcggtgcggcacccgctgcggtgtacattgagtctgcggcaggtacggcagcgggcggcaaaaccggtctaaccgccacggtggtcgggtgctgttcctgctgatgctgttcctttctcctctgtcctatctggtgccgtcctatgcgaccgcgcctgcgctgatgtacgttggcctgctgatgctcagcaacgtgaccaagctggacttcaccgactttgttgacgccatgtcggggctgctgtgtgcggtatttatcgtgctgacctgtaacatcgtgaccggcattatgctgggctttagctcgctggtcgtgggccgtatttgctcaggcgagtggcgcaagctgaaccttggcacggtagttatcgccgttgcgctggtggtgttctacgccggcggctgggcgctttaacgtcctctctcacgcttccccgcgcctgtcgcgggggaaagtcgcttgtttcttcttcccccgcattcataaaccaacaaagtttgttaacaacatttacacttcactttcagacgtctgcaatttttatccattgttaaaatgttttactatcaaattgtcgtgcaggcccggcctgcgtccagctttaagcattaacctaataacaagagtctaaggaaagcatggaaatattttttaccatccttattttgattctggtggtgtcgctctccggtgtcgttaccaggatgttgccgttccaggttccacttcctcttatgcaaatcgccgtgggggcattgctcgcgtggcccaactttggtttacacgtcgatttcgatcctgacttgttcctcgtgctgttcattccgccgttgctgttcgccgatggctggaagacgccgatgcgcgaattcctgcacaaagggcgagagatccttgggctggcgctcgcattggtgctggtcaccgtagttggggtggggtatctgatttacatgatggtgccgaatattcccctggtcgccgccttcgcgctggccgccgtactgtcaccgacggacgccgtggccctgtcgggtatcgtcggtaaggggcgtattccgaaatcgatcatgggtatcctcgaaggcgaggcgctgatgaatgacgcgtcgggcctggtatcgttgaagttcgccatcgcggtggcgatggggactatggtcttcaccgtgccgggtgcgacggtcgagttcctcaaagtggccatcggcggtctgttggccggcgtcgccgtgacctggctgtacagtaagtcgctgcgcatcatgagccgctggagcggcgacgacccggcgacgcaaatcgttctgctgctcctgctgccgtttgcctcctatctgattgccgaacacattggcgtttcaggcattctggccgccgtggccgccggtatgaccatcagtcagtcgggcattattcgcaatgcaccgctggcgatgcgcctgcgcgcaaacagcgtctgggcgatgctcgaatttgtgtttaacggcatggtgtttatcatgttgggcctgcagctgccgggcattctcgagagctcgctggaccaggcaacgcatgacccgagcatcgtcacctggcacctgttcgccgacgttgccgtcatctacttcgccctgttgctgctgcgtttcgcctggctgtggctgatgaagaacttcagcaaccgcctgctgaagaagcgtccgctgacctttggcagtttctcgacgcgtgagctgtgggttgcctcctttgcgggcgttcgtggcgcgattacgctggccggtgtgctgtcgattcccctgttcctggccgatggttcggccttcccgtcgcgctatcagctggtctttttggccgctggggtgatcttgttctcgctgattgccggtgtggtggcgttgcctttcctgctgcgcggcgtggtcgtggacaagtcctcctaccgcgaagaagaacgtatggctcgcgccgtggctgctgaggtcgcgattgagagcctgcacaagatggaagagcgtcttgccgccgattcggaagagaatattgacgagcaaacgctgaaggaaatcagttcgcgggtggtgggaaatctgcgccgacgcacggtcggtaaagacgacatcgaacacgcgctgatgctggaaaaccttgagcgacgtttccgcctgacggcgctgcgtgcggagcggggcgagctttatcacctgcgtgccacccagcgtattagcaacgagacgctgcaaaaactgcttcatgacctcgatttactggaggcgctgctggtcgaaaaagaggtgtaatccctgcctttgaaccgcttgaaaggcccgccggttaacgcccgtgggccttttttatggtcttggctcaggaataaggctctctggccaaaactctcggctgcgtgctatccacgcctgtgcgctctgcgacagatagctgccctgccgccagatgagacctaactgccacagcagggttggggtcagcggcagccaaagtagcttctcgccgtccagacgctggcacactggctcgggcaggatggcaatacccattccggcctgtaccatcgcggcaagaaaatcccattggccgctgcgtgcggctatcttcggcgtgaaaccgtgggcgctaaaggcgtccagcaactgtcgataaagcgcaaaatcttcgttataaatcaatatgctttcatcgctcagttcgctgagcgtcacgctgctgcggttgagccaacaggcggttttcggcaccaccacgcataaaggatggctaaacagcagctgtgaggtaatcggcagcgcggggtcgatgggtagggcagtgagcgccagatccagctcgcctgacagcactgcctgttgcacggtcaggccgccaaactctgaaataatcagttcgataccaggataatgctgacgaaactcaccaatcaggggagccatctgcgtgcccaccatcggcggtacgccgagccgcagcaggccacgtttgacgtcattaatgtcttccaactcggcctcaagctgacgaaactcctccaggatattcaggccgcgctggtaaagcgcttgtccgctgtcggtcaaccgcaggcgacgcccttcgcggatgagcagcgtacactccagctcctcctccagattgcgtagcatcttgctgatggtcggctgagtgacaaacagtttttccgccgcgcgggtaaaactctgctggcgaacgacttcaacgaaatagcgcagggtgcgaacgtccataaggctccagtgacctaacattccaatttggaatcatttggataattttaattcatttcttaacgggtttctcctcgccgtatactgaaatctctaattattcgtcccccgaggtcagaccccatgatgttggcgttgcgcctgaaagcgccgtcgttgctcacgcgctttcaggtaccgattcaggttgtgctgtacgcgttactttttatggtcgcagaccgcctggtcggtgcgctgcatctgccgctgcccgccaatattgtcggtatgctgatgatgttgctgcttatcgcctttcgcgtactgccactgagttgggtaaaggccggttctcgctggctgctggccgaaatgctgctgtttttcgtgcctgctgtggtcgcggtagtcaactacgcccagctgttgatggtcgagggatggaagatttttctggtgattggtattagcactattttgacactgggggcgacggcggtggtggtcgataaagtctataagctggaactgaggatggcggagagaaaaaacgcacatgcgttgcagaaggccgaacatgattgatttatcgatcagtattctctgtttcgccatcacgctggtgctgtattacgccaacaaaaggctctatcgctggcgtcgaagcttgctgtttatgccgttggtgtttaccccggtggtactggtggtgctgctggtggtgacgcgcgtctcctataaagactatatcggcgaaacccactggctgctgtggttgctgggaccgtcgactatcgctttcgcggtgccggtgtatgagaacatggctattattcgtcgtcactggatttccctgagcgcgggcgtggtgacggcaattaccgtcgcggtgtttagctcggtgtggttggcgcgggtgctgatgctgccggaagaaatacagcgcagtcttgccgtgcgttcgatcaccacaccgtttgcgttggcggcggcgaaacaggagggcggtcagcctgatctggtggcgctgtttgtggtgataaccggtgtattcggcatggcggttggcgacctgctgttcctgcgtctcgcggtgcgcagcgcgctggcgaaaggggccgggctgggtgcggcatcacacggtgcggggacggccaaggcctaccaaatgggcgccgaagagggcgtggtctcgagtctggtgatgatgctagcgggggtgatgacggtactgatcgcgcccttgattggccgctatatgtggtgatactgcggccaaccggcgcaacccgtgaggtgcgccggttggccggtaagttagtgaataatttgcgccaggaactcgcgcgtcctggctgacttaggattcgcgaagaactcttccggcggtgcctgctctacaatctccccctgtccataaagataaccctgtccgccacggtgcgtgcaaagcccatctcgtgggtcacgcaaagcatcgtcatcccttcttcggcgagaccaatcatggtatccagcacctctttgaccatctctgggtcaagggccgaggtaggctcgtcaaacagcatgattttcggtttcatacacagcgaacgggcgatggcaacgcgctgctgctgaccgcctgaaagctgtcccgggaacttgtgggcatgctcggcgatgcgcacgcgcttgaggtatttcatcgccagctcttccgcgtccttcttcggcatcttgcgcacccagcaaggtgccagcgtgcagttctgaagcaccgtcagatgcgggaacaagttgaagtgctggaacaccatgccgacctcggtacgaatgcgctcaatgttgcgcaaatcgtcgttcagttcggtaccgtccacgacgatacgtccctgctggtgctcttcaagatggttgatgcagcgaatggtggtcgatttacccgagccggatggcccgcataaaacgattcgttcgcctgacgttacgttcagattgatgcctttcaacacgtggaactgcccgtaccacttgttaacgtcttccagcgtaatcatcatttttttagtttcggtgacgttatagtcgctcattgtttacctcagtgtcctgaatgcccggtgtggaagcgtttttccaaatgctggctataacgcgacatgctaaaacagaaaatccaataaacggcggcggcgaagacatagccttcggtcgacatgcctagccattcgggagcgacggtcgcctgctgcacgctgctgaaaaagtccatcaaaccgatgatgatcaccaggctggtgtctttgaacagcgcaatgatggtgttgaccagacccggtatcaccatcttcagcgcctgcggcagaatgaccagcatctgcgttctccagtagccaagcgccagcgattgtgccgcctcggtctgccctttcggcagcgcctgcaggccgccgcgcaccacttccgcgacataggccgactggaacagcaccacgccgaccaacgcgcggaccagcttgtcaatgctggtgccttcgctcataaacagcggcagcatgaccgaggacatgaacagcaccgtaatgagcggcacgccgcgccagaattcgatgaaaatcaccgacagcacgcgcacgatcggtagagaagatcgtcgagccagcgccagcagaatgcccagcggcagcgcacccgcgataccgacggcggcaatgactagcgtcaaggtcagcccaccccactgataggtctcgacgcgactcaggccgaagaatcccccgtagagcatgaaccaggtaaagaccgggaaggccacggcccagcaggcgacgtacagcccacggcgcggcatcttcgcggtaaacatcggcaccagcgaaagcagacagacaatcagcgtggtattgatgcgccagcgctggtcggttggataaagcccatacataaactggccgaagcgggcgtggataaacacccagcaggctccctgttttgtacagtctgctcgggtggtgccgacccagttggcctgaaaaataacccagttcagcagcggcgggaccagttcccacagcagccagaggaacagcagggtcagcaggctgttgaacccgctggagaacagatttttacgcgcccaaagtacggcgttgccgaagggggtgccgggcttggcgccccttacagagtgcgggagtgttgtcatcgtcattcgcttcccttaacgctcaaccagcgcgatgcggcggttataaatgttcattaagaacgaaattaccaggctgataaccagataaactgacatcgtcatggcaatcgtctcaatcgcctgtccggtctgattgagtaccgtgccggcaaacagagacaccatgtctggatacccgatggccgctgccagggaggagtttttgacgatgttgagatactggctggtcagcggcggaataatgacgcgcatcgcctgcggcaaaataacctgacgcagcgtgaccggattcggcagtccaagcgatcgcgccgcttcgtgctgtccataagatactgactgaatgccggagcgaatgacttcggcaataaaggttgaggtatagaccgacagcgccagcgtcagcgcccctagctcggggataagcaccacgccgccgccgaagttaaatcctttcagctttggaatgtcccaatgcaatgccgggccgaaaatcagctgcgccaaagccgggaacagaatgaccatcgcgacgcaccacggccagatgcgccacaccagaccggtatgaatctgacgaaaatggttatagcgtttcaaaaacagaatgccaccgaccgccaacagcagggcaaccagcgcggcccagaatcctgacgacatctctggagacggcaggtagagaccgcggttgctggcaaagaccgtgtcgaaggcgttcaggctctgtcttggacccggcaggttgcgcaaaacggcaaagtaccagaagaagatttgcagcaacggcggaatattacggaaggtctcgatgtagacggtgcacagcttgcggataagccagttgtcggagagtctccctaatccgaccacgaagccaagaatcgacgcaaagacgatgcacagtgccgagaccagcagggtatttagcagcccaatgaagaagacgcgggcgtaggtgtcgccttcatcgtaactaatcaggtgttggacgatgccaaatccggcaccgcggctcaagaaatcaaatcccgaggtgatccctcgcgtcgttagattggtaatggtgttgtgtaacaggtagcccagacaggcaaccagcaacaccaccgcgaaaatttgatacagccaggcgcgaaccgcagggttacgcagagagaacgcgactttttcggttgggcgttgcgacataagagacagcctcagtatgcggtaattcgagtgttacaggtcttggttgaggcgacacgccctggactgacgtgtcgccatgcggcaggaattaacgaacgggtggtgcgtactggatgccgcctttgttccacagtgcattctggccgcgcgcgattttcagcgggctgccttcaccgacattgcggtcaaagctttcgccgtagttaccgacctgtttaacgattttcactacgaaatcattcggcaatttcagatcttcaccgtacttgccagttttacccaacagattgctcatatcaggcgtggtcgggttagcagccatcgcatcaacgtttttagaggtcacgcccatctcttcggcgttcagcatggcgaaaagcgaccagcgcacgatttccagccagtcttcgtcaccgcgacgtactaccgggcccagcggctctttggagataacttcaggcagaacgacatagtcatccggtttgcccagtgactggcgcagggcgtaaagctgagactggtcggaagaaagggtgtcgcagcggcctgactctaacgccttggcgctgtcgcttgaacggtcaaaggtgaccggcgtgaaggacattttgttggctttaaagtagtcggccacgtttagctcggtgtcggtaccggcctgcagacagacggtcgcgccgtcgagctctttagcacttttcagaccggctttcttgtgggtcaggaagccgatgccgtcgtaatagttgacgccagcgaagatcatccccatgccgccatcgcgggatgaagtccaggtcgtgttgcgcgacaggatatcgacttcacccgattgcagtgccgtgaaacgctctttcgccgtcagcggggtgtattttactttggttgcatcgccgaagacggctgcggcaatcgcgcggcacacgtcaacgtcgagtccggtgatgtttcccttgtcatctttggacgagaagccaggtaagccatcgctgatcccgcatttgataaagccgtttttcttaattgcgtccagagtcgtgcccgcgtgagcttgtccaatcagggtgacaaaacttgccgcggcaatcagcgttgagagcagtatttttttcataaatcgtcctgtgaggcgagagcgaacattattattttgtgagtgccggagcaccctgtctgtttatggggcaaagcccgcagctcaaaaacatgcgagcaaaacggctaaagcaaagggaatgccaacattgaaaatgcttagtaatcaaataccgggggtgattgaccagtaacaataatgagatgatgtagatttattgacctgttttggggcggggcaaacggcattgctttaaaatggtgcgcagtattcggattttggtgagggatgtttaccggtttagtgatttttataacattcggtaatattcagacgataaatgaattgagaatatgacgggatttctcggccccgaaggaccgagagacattatgaaaagtttttaaatacttgccgcctgaatcagggcagcgaccaacggaggaagctcacccttcagcgcggcacgttcaggctggaacagggtggcgacatagaaaggatgtcccggcagctcgatagccctcacttcccctgcggcatcatgaccgaccatcttaagcgactgcccggccagtgccgattggaattcagtgttaatcccatagcggcagcggtaaccctcctcaatctccagcgttgcgtaggccttggcagggatgctgccctcaaggagcgtgacgctgccctgtttctcgaccatttcacaggccagtgcggcgataaccaggcgtccttcggtatccgtttcgccgtggcctgcgtcctgccaatccatcacgttacgggcgtactcgatgattgcatgttggaatccaccgcaggtacccaggaatggtttgttttgttcacgggcaaaacggatagcgcgtatcgctccttcggttgaacgataggggctgcccggagtacaccagaaggcgtcaaaatgcgacagcgaagcgggatcgtcggtaatggtttctgtggcgagccagtcggcgtggatgctgatgttgaagcgttgtgcggcgagttctacggctttggggatagcctggtgggctgttatcgagggatggtaatccccgaccagcgccagacgaacggtggttttcatcacttctctcctgggcaggtaaaaaagaggttatagaaaaaccgtttttctgtcgctaactttttatcgtttctatgaaaagggaaataaaaaacccggcgcaaaggccgggtttatcgccatcaaacgccgctaaagatagagggaaggagcaccctctgggcgggttttgaagcggcggtgcagccaaagatattgctctggcgcacgcatgatttctttctcgactacgcggttcatataggcggcagcggcgagttcgtcatcgatagggtagtcacgcagctcaggctggataaccaggtcatagcctttacctttatctttgcgcaccagaaccacggaaaccagcgccggtttagccagacgggccagcatataggttccactggtggtcgcagcctgatcgacggcaaacagcggcgcgaatacgctgccacgtgggccgtagtcctgatccgggcgaaccatacggcttcaccacgcttcagggcgtgtaccatgccgcgcagatctttacggtcaagcatcgccttgttggagcgcatgcgaccccaagtctgtacaaactccatcaccttgttgttgtgcgggcgatacatcgccatcatcggttgacacagacccatggcacggccaccgagttcgagcgacataaagtgaacgccgatgatcagcacgccctgtttattttgctgcgcgagtttgaggtagttaagaccgctgacgtcgaaccaacgtttgacccgtgcgtcggaccagaaccaggccatgccggtttccagcagacccatgccgagagattcaaaattgccgacgattctgcgctcgagctgatcgctgtccatatcggggaagcacagctggagattgcgacgcgtgatagaaacacgacgctttagaaaacgcattgaggtgcgaccgagccaaacgccaagacgatacaggaccggataaggcagttggaccagcaggaagaggacgccaaggccaaaccaggtcagccaataacgagggtgtaaaaaagacttcttaaagcattgagtgggtgcggtcatgtaatttcaatcatcaaagtgagtgaattttgcgtagcgcgtaaggagtagctcaatcgcgatacaggcttggtttgcaattattcggactcccgttttgggatttagttgtgagaaatcacaatcttctcgaatctttacatttaaaggcgggcatcgcggggctaaaaggctttccgtaggcgattggcggggcgaattcgactctatgcgtacattgtatcacgttcaacaaatcataatgtggaaggattcatccgaatcgtgcaaagtttacgcaccgtttatgtccgattgtaaatgttccgactttcattaccttaaccagagtcattctttatatagacgtcctgtaacaggtttttctgtcgagtaatggatccgtttgcttagtgtaaaaatagcgtaaggcgaagttttttaggatatttcatgatgttagttctgcatgctgtgccagatattcgtggtgtgcacctgccacagcaaataactcgaaggataatattatgaaaaagacagcgctcgcaatcatgttcaccgttctggcaagcaacgccgtattagccaccgcgcatgcggaaggcccaattcaccacccggttccaccgcgccaccacgtggtacaccacccagtacaccgcgttgtgcatcatccactgccacgtcaccatgaaccgctgcgtcacgagccgattcgccacggttaatcaacgtcatacaatatggcgaaaaacgcagtcctgatttcacgccaaagaaaaaggcgccttatctttcgataaaggcgccttttttcaatgcattaactgactagtatcagttcatgccgtattttttcaatttcttacgcagagtaccgcggttgatacccatcatcagggctgcacgagtctggttgccacgggtgtactgcatcaccatgtccagcagtggctgttcaacttcagccagtaccagctcatacaggtcattgacgtcctgaccattcagttgagcaaaatagcccttaagtgcttgttttaccgagtcacgcaggggtttttgggttacctgatcctgagaattaacggtagaaacggtcagtacatcagaattcacgcgttgttcgaacatagttctgtcagctcttttttgttacgcaagattttcgaaatatgcttccaacgcctccagctgttcgctggcatcctctatggcgttgaaggagcgccgaaactggtcattcggggcatgttcctgtaaataccaggagacgtgcttacgagcgatacggaatcccttgccttgaccataaaagtcgtgcagttcccgtacgtgccctatcatcaagcgctgtacttccccaagtgttggcggcggtaacagctcccctgtgtccagataatgctggatttcccggaagatccagggtctcccctgagcggcacggcctatcatcagagcatcagctccagtgtagtcgagcaccgctctggctttatgcgggtcagttatgtcgccattcgcgataatcggaatagagacactctgcttaactgtccgaatactgttgtactctgcttctccattgaagaggcaggcacgggttcggccatgaatcgtcagggcctgaataccacagtcttcagccaattgggcaatttgtacacaattacggtgttccggagcccaaccagtacgaattttcaacgtgactggcacatcaactgcattaaccactgaccgcaaaatctgttcgaccagatccgggtactgaagcaacgcagagcctgccagtttgcggttcactttcttggctgggcaacccatattaatgtcaatgatctgagcacctgcctccacgttaatacgtgcggcggcggccatatcttcagggtcacagccggcaatctgcacggcgcgtatccctgattcatcactatgtaccatacgcaaacgcgacttatccgtgcgccacacctctggattagaggagagcatttcggatactgccattccagcccccattgaatgacataaggctcgaaacggtcggtctgttataccggccatcggggcggcaatcaggcaatttgtaagctggtggtgtccaatgcgcatgctaggaaagaccatactgaagtccgcaagggcgcgtatattacgcattttttgcaggatatgaaaggccaaactttgagcaattgctcaagaaaaacggcctttacgataagattacatcgctaaaattaattttttttatttaaaacagaaggttaattgcaaatgctcaaattgtgcgcttgtataatttacttacttatcgctagttatcaggcgaataacaggcgattctaaggcgaaaattgcggttttaagtagcaataaccgcaccatttccgtgatgcaaccgtcagttttgttaaaaaatgaacaaatttaagtaaaatttgataacaaactgtggctcaaaaaaagaacggtgctgggaaataatcaggcaagaggtcatcgggggaacgaatccccttaagagaccgctggggattagccttttttgacaccggtaatgcggcaccattcttctttctcggcaaccgggtcaagcaagaacagatcctgataggcctccgccacgcccgccgcctggctcgccaacacgccggacagaccgagatgaccgcctgtaaccggcagcacgctgatgagcggcgcgagctcgcgcaaagggccagcaaggatgttggcaaccaccacgtcggcagaaaggttatcaggctggtccttaggcaggtagagcgacagacgctctgagaccccgttacgctgcgcattatcgcggcttgccagaattgcctgtgggtcgatgtcgataccgatagctttagccgcgcccagtttcagcgcagcgatggccaggatgccagagccacagccgaagtcgataaccgttttaccttcgaggtccaggccgtcgagccattccagacacattgccgtcgtgggatgcgtgccggtgccgaacgccagacccgggtcgagcatcacgttaaccgccgttgggtccggcacgtcgcgccagctcgggcagatccacagacgttggccgaatcgcatcgggtggaagttatccatccactcgcgctcccagtccttgtcttcgagctgctcgattttatgggcaaaaccctgacccagcagcggctcgttttccagaatagcgaccaccgtctccatgtcggtttcggcgtcatacaggccaatcgcgtcggtatcgccccacagcagagtctcgcccggctgcggctcaaataccggattatcatgggtatcctggaaggtcacagagaccgcgccgctctcgatcagcgcatcgctcagcgtttcagcatcctgagcgttagtgttaattttcagttggatccaaggcataaccattctcttctaacaaggtgttttgtctggcgtctcaggaagacgtcagtgcgttttcgcggcgttgctcacccattttgttgccgatgcaaaaagccagcaggctgagcagcagtgacggaacaatcgggtgcaaacctgcaatatgcagatcgatagtggccaatagggtataacaaactgcgccgacgatcatcgaacacagtgcgcccgttgcgttagcgcgctcccagtagagtccgagcaccagtggccacaggaacacggcctcaaggccgccgaaggccagtaggttgagccagattatcatctgcggaggatgccaggcggtcagtaccaccagcagcccaatcaccagcgtcgccagactcgaaaagcgtttcagcatacgttcgttgcgcaattgggcaggacgcacgccgagatagagatctttaacgatggtagccgaagactgtagcagctgcgcgtttatcgtcgacataatggcggccattggcgcagccaggaagattccggcggcaaacggcggcagcacggtgatcatcagcgtggggatgacctgatccggcaccttgagatcgggcaggatagcccgacccaacgcgccggaaagatgcatgccgaacatcaggatggccactaccagcgtgccaagcacgataccccgatgcaccgccttgctgtcgcgataagaaatgcagcgtaccgccgtgtgcggcagaccaatgactccgaagcagaccaaaatccagaacgaggtcataaacggcagcgaaaggacattgtctgcgccgtgcaccgacaccaggttgggatcgatgtgccgcagcttgtccacggcgccgtgcaagccgcccgccgcatgaatcaccgcgaccagcagcaggacggtgcccagtagcatgaccagcccctgcattgcatcgtttaaaacgctggcacgaaatcctccaaacgaggtgtagagcgcgatagtgacgccaaaaatcagcaggccgctgtcgtagggaatgcctgcaaccgtctcgagcaggcgcgcgccgcccacaaactgcacggtcatcgcccccaaaaaggcgaccagcagactcaggctggcaaaccacaccagcaggcggctctgatagcgagcgtaaagcatgtcgttaagcgtgaccgcattgtaacggcgcgccagaatcgcaaatttcttgcccaatacgccaagcgacagccacatcgcaggcagttgaatcatcgccagcagcacccagcccaacccgtatttataggctgcacccggcccgccgataaacgagctggcgctgatgtaggtcgcagtaagggtcatggccaatacaaagccgcccatcgaacggttaccgaggaaatactcggtcaaaaagctgccctgctgacggcgggtgtaggcaaaaaccgacaggccaaacaccaccagcagataggcgataagcgggagcagaacttcagtctgcatgcgggtcctccagcgggatatcacgatagatgacgcgcaccatcagccagctcagcagcacaaagataagcgggatcagcaggcaggacatttcaaaccagtggggaaggccggttatccctgggcatcgttcggcagataggcggccagcgcccaggccagcatgtaggctatcgtcaggccaaaagcccagcgtgcctcgcggttagcctgtaaaaagcgtttatccacgcgcaatcctcaaaaacgaaaaaaggccggaatatccggccttattgtaagctcttgcattacaaggacttattagtcctgaagtccgagtttcttctccaggtagtggatgttggtgccaccgttctggaagttctcgtcgttcatgatgcgcagttgcagatcaacgttggttttgatgccatcgataatcagctcagccagagcatttttcatacgggcaatcgccacatcgcgattttcaccgtaagtgataagcttaccgatcatggagtcatagtacggaggcacagtgtagcccgcgtagatatgagactcccagcgaaccccgaaaccaccaggcgcatggaagcgggtgattttgcccgggctcggcaggaaggtattcgggtcttcggcgttgatacgacattcaaccgcgtgcccctgaatacgcacttcgtcctgcttgattgacaaaggttggccagcggcgatgcgcagctgctctttgatcaagtcaacgccggtaatcatctcggtaaccggatgctcaacctgaatacgggtgttcatttcgatgaaatagaactcgccgttttcatacaggaactcgaaagtacccgcgccgcgatagccgatgtctacgcaggctttagaacaacgttcgccgatgtagcgacgcatttcggcagtgatgcctggtgctggcgcttcttcaacgactttctggtgacgacgctgcattgagcagtcacgttcagccagatagatggcgttgccctgaccgtcagccaatacctgaatttcgatatggcgtgggttttccaggtatttttccatgtaaaccatgtcgttgttgaaagccgctttggcttcagcacgcgtcatgttgatggactgttccaggtctttttctgcgcgaacaacgcgcataccgcgaccgccgccgccgccggacgctttgatgataaccggataaccgatgcgcttaccgaaagcgcggttcttatccatgtcatcggtcaacggaccgtcggagccaggtacgcaaggtacgcctgcttttttcatcgcgttgattgcagaaactttgtcacccatcaggcgaatagtttcggctctcgggccgatgaagataaagccggaacgctcaacttgctcagcgaagtcagcgttttcggacaggaagccgtatcccgggtggatagccactgcgccagtaatttcagcagcagagatgatcgccggaatattcaggtagcttttgaccgaaggtgcaggaccgatacagacggtttcgtctgccagcagcacgtgtttcaggtcgcggtcggcggtcgagtgcacggcaacggttttgatacccagttctttacaggcacgcaaaatacgcagagcaatctcgccgcggttagcgattacaattttatccatggtgcgcctcgttattcgatgacgaccagcggctcgtcgaactcaaccggttggccgctttctaccaggatggctttaaccacgccagatttgtcagcttcgatttggttcatcattttcattgcttcaacgatgcacagggtgtcgcctgcgttaaccttctggccaacttccacaaacgctttagcgtctgggcttggggtacggtagaaggtacctaccattggagaacgaacgatgtggccactgattgcagcaggtgcagcggcttcagccggtgccgcagcggcaacagcggtagccagtgctggctgctgtggagcaggcatagcgtaagcctgttgcatcattgggtaagcttgtgcaggtgctgcgcggctgatgcgtactgattcttcgccttcagagatttccagttcagaaatgcctgattcttcaaccagttcgatcagttttttgattttacgaatatccatgggtgtgattccgtactcttatgcaagtaattaattggattttgacaagcggttaaccgctgcctgtaaagcaaaatggtagccatctgcgccaagtccgcagataacgcccaccgcgatatctgaaagatatgaatggtgtctgaatgcttcgcgggcatgaacgttagacaggtgaatctcgataaacgggatttgcaccgccaacagtgcgtcacgaagcgccacgctggtatgggtaaaggctgcgggattaatcaaaataaaatcggtgtttccccgtgcctgatggattctctcaatcaggaggtgctctgcgttagactgcagatggcttaacgcaacgtctgatgcgacagcctgctgttccaaacctttaacgatatcgtcaagcgtggtacttccataggtttcaggctcacgcgttcccagcaaattgaggttgggaccgttgagtagcaaaatgtcaaacttatgcgccattgtgagcctatctcctgcgattagtacgaggtcgaagaaaataccttgccgaactcaatttgtcacctatttcatcacaaatcaacccagacttttcttaggaaagtgcgcattataatcatatcgtggcaattcgcagctaaatactggtcttatcagcgaagatgatcaaccctcagtttgaaactgagggttacagaaaggagggcgaaaccgggcgaaaggggcgatttgtgggggctcagcgcaaccactgccgaaacttcttgtagcgaagaagcagcaagatcgctgcaaatagcgcgtaaatgaacggttgtggcgaaaatgtctttaccgaccataaatagtgaatcggggccaaaatcagcaccagatagataccgttatgcaaaatctgccattttttcccgagcttacgctgtgaccaaagcgtagacgttgccgccagaaacagcaaaattatccagctaataatccccagcgtgagatagggacgcgaaatcagctcgctgccgagcagccccaaattgtggatccccaactccaaaaacgagtaactgagcagatgaatcgttgcccaggcgaagcaccacaggccgagcaggcgacgaacgcgaatcagcagcggctgtttggcgtaacgtgcaagcggagtcaccagcaaagacgccaacagcaattttagcgccattctgccggtaaaatgctggatgtcttttgccggatcggcgctgaaccatccctgattgatagacaagataatccacaaaagcggcaaaaatgccgctaaatggattaaaaccttcaaccacgtaatttgctttaatgaaaggcgagggatcttcatatcaatagtttttccgcaggtctaaaccgtgatacaggtggccgacctctttttcatagccgttatacagcagggtcggttggcgctgtacgtcaagcaagccgccggaaccgataaagcgttctgtcgcctgcgaccagcgaggatggtccacgtgcgggttcacgttggcatagaagccgtattcgtcggcggcaatctggttccaggtggtcggcggctgctccttcaccaggcgaatgtgcacgatcgacttgatgcctttaaagccgtatttccacggaatggtgaggcgaatcggcgcaccgttctgcggcggcatggttttgccgtaaaccccgactgacagcagcgccagcggattcatcgcttcgtcgagacgcagtccttcaacgtacggatagttcaggccgccgccgataaagcggtctttttgccccggcatatgttcagggtcatataaggttgtaaacgccacgtagcgcgcatcgctggtcggttcgaccagtttcagcagtgcgctgagcggaaaaccgacccacggcacgaccatcgaccatgcctcgacgcagcgcatgcggtaaattcgctgctccagcgggaaacgcttgaggatgtcgtccatatccagcgtcatcggtttaccgacctcgccgtcaatggtgaccttccacggtgacgtcggcagttgcccggcgttggcggcaggatcggccttatcgaggccaaattcgtaaaaattgttgtagccagaaaccttgtcctccggcgttaacggcagattggcctgatacatcgcgggtttggtgaaatccagcggtttcccggcaggcgcttgcgggcgatcgttgcccttgaaccaagaaagcagatcggcctgcgaggtacccgggaaagccagcgatgcggcaccaagccccagcgcctgcaacaccttgcggcgatcgtagaagatgctttccggcgtgacgtctgcttcggttaatacttttttatggctcatgacatgctccggggaaatgacccttcgtcttgaacggcattgggaggttatagttcttttataaaggtagtgatattcatacataagaattctgaattgacggcataacaccttactatgctatttatatacgcctgtcgtgaatcaggacttttcgctaaaccgatttattccacatctgtttaaccacgatacaccacataaactgagtaaggcacatggatgcgatttactaccagattatatgcgatgatttctatgctggtcgcgctcaccatctttttgatgctggtgggcgtgaccttcagctttgtctatctgaataaacagagcgccgagcagcatctgcgggcgctgtctacctcagtcgatcaaagcctgctggaaaacccgccgtcttcgttgaagacctggctgccgttggcgatgaaccagttagatattagcagccttgaggttgttgctgggcacggaatcgtttaccgccacgataactctcctgactacggcaacgcctgggccagccattttcccgactttatcacccagcgcatcccactggtacagcatccggatctcagtctcaaggtggtctacctcgatccggtgagcagctatgcgcgttcactgcgtaccacgctctatattagcttctcgattttgctcatcatcgttgccacgctcgccagcttccgttggctgcgtttgcagacccgaggcctcgagcggttagaggatagggcgacgcgtattctgcgcggtcagcgcgacaatctgccgatgggcgacgtgaacgaatggccggcgaagacaagcgcggcgattgacaagctgttggtcgacctcggcgaagcgcgtgaacagcgcagccgggttgataccctgattcgcgcctatgcgcagcaagatgcaaaaaccgggctcagcaaccgcctgttctttgataaccagttgaccaccgagctggaagaggacggcgcctacggcattattatgctcatccgcctgccggacttcgatacgctgcgcgataaccacgggcaggggccggtgaaagacctgatgtcgtcggtggtgaatctgttgtcaacctttgtgatgcgctatccgtctgcgcttctggcgcgctactaccacagcgatttcgcggttctgctgccgcacagtacgctgaaagacgccgaggtgatggcggctcagttggtcaacgcggccggggtgattccttcctcatctattattgaccgcgatgcgctcttctatataggtatcagtgcctatcgcttcggccagaatctggaccaggtgatggactacgccgagcaggccactcgccacgcggcgttcaagggcagcaacagttggtctgtctacgacagcagcgtgcctgaacaggggcggggcagcgtgagatggcgtacgctgctcgaagagacgctggcgcgcggcggcccacgtctttatcagaaaccggccatgaacaaggctggcgtgctcgatcaccgtgaggttcagcggcgcatttttgacggcacccgcgagctgctggcggccgagtttatcccgttggttacccagtttggcatggcgcaaagtttcgacagaagaatggtcagtcagattattccgttactggcccaatggccggacgagacgctggcatttcacctgaccgttgattcattattgcaacgctcgtttgtccgctggctgcgtgatgttttgctccagcgcgaaaaaaagcagagaaatcgaattcttattgaacttgcagaggccgatctctgtcaacatatcgaccgtcttcgtcccgcactccgattgttaatggggttggggtgcagactggccgtttctcaggctggactgaccgtcgtcagtacgtcttatctgaagtctttcccgattgaaagggtaaaacttcaccccggattggtacgcgatatcgataagcgggttgaaaatcagctgtttgtgcaaagtttgctgagcgcctgtaaaggcacgcaggccaaggtctacgcctcgggtgttcgcacaattgacgagtggctcgtcctgttggaaaacggaattcacggtggtcagggagatttttttgccacgccgcagattgttgaccctgttggtaaaaaatattcacacaaccacggggtttaatctgatcccaacgggaaaatttaacgtagaatggcgcagccctgccatttgcacattagggcagcctgtttcagcgcgtaatttctaccgtatgcgctgactaaagccaggtaaagtgtaagaatttatgtgcgatgtccgcgactcgacgggtgcctgagtgagttaagctgagtcaatgattcaggtttcctccgcagtgtatttaatcaccaggttaagtggcgaacgtcgctgacaattttcacggaagcagaacgtttttgcgccttgtcgctgcttcgcgtggttggtaaagtaggcggattttattttccgcccccagcttgcaggattatcctttcgttatgtttaagaaatttcgcggcatgttttccaacgacctgtccatcgacctgggtactgccaataccctcatttatgtaaaaggacaaggcatcgtgttgaatgagccatcagttgtggctattcgtcaggatcgtgctggttcacctaaaagcgttgcggccgtgggccatgatgcaaaacagatgcttggacgtacgccaggcaacattgcagctattcgtcctatgaaagacggcgttatcgccgacttcttcgtgaccgaaaaaatgctgcaacactttatcaaacaggttcacagcaacagcttcatgcgcccaagcccgcgcgtgttagtttgtgtaccggtcggtgcgacccaggttgagcgtcgcgcaatccgtgaatctgcccaaggtgcaggcgcacgtgaagtcttcctgattgaagagccaatggctgctgcaatcggtgcaggcctgccagtttccgaagcaaccggctcgatggtggttgatatcgggggggtacgaccgaagtggccgttatttccctgaacggcgtggtttactcctcgtccgtccgtatcggtggtgaccgtttcgacgaagccatcattaattatgtgcgtcgtaactacggttcactgattggtgaagccaccgcagaacgtatcaaacacggtattggttctgcttatccgggcgatgaagtgcacgaaatcgaagtgcgcggtcgtaacctggctgaaggcgttccacgcggtttcaccctgaattccaacgaaattctggaagccctgcaggaaccattgaccggtatcgtgagcgctgtgatggttgcactggaacagtgtccaccagagctggcgtccgacatctccgagcgaggtatggtactgaccggcggtggcgcattgctgcgtaacctcgatcgcctgctgatggaagaaaccggtattccggtggtagtggcagaagacccgctgacctgtgtggctcgcggcggaggtaaagcgctggaaatgatcgacatgcacggtggcgatctctttagcgaagagtaagactgctaaagaatacgcgactgaagagtagtgtatgcccacaagtatttgaagccgccgagcgcgttgacgccttgcggcttcaggtacgtcgggtatagtgaaaactagcctgccgcggaacagggctgtcccctttttatacctgctaccattcctgttagggtaatgtttcgcacagatcggctgaattttcccgttgccgaggaactcgcatattttatgaagcctatttttagcagaggtccgtctctgcagttgcgactttttttggctattcttacggccatcgtcctaatttttgccgacagtaagataggtacgttcgtacagatccgcacctatatggatactgccgtcagccctttctatttcttgtccaatgcgccaagagaattcctggataacgtctctcagactttcgcgtcacgccaacagctcgagctggaaaaccgcgccctgcgtcaggaactgctgctgaaaaacagtgatttgctgctgctgggacaattcaagcaggagaacgcccgtcttcgcgaactgctggggtccccgctgcgtcaggacgagcataaaatggtgacgcaggttctctctaccagcaatgacccttacagcgaccagattgtcattgataaaggcagcaacagcggcgtttacgttgggcagccggttatcagcgacaaaggcgtggtgggacaggttatcgccgttgcggccgtgaccagccgcgtattgctgatttgcgatgcctcgcacgctatccctattcaggtgctgcgtaacgatatccgcgtcattgctgctggcagtggctgtaccgatgacctccagcttgaacacctgcccgccaataccgacatccgggtgggcgatgtgctggtgacgtctggtctgggcggtcgcttccctgaaggttatccggtggccgtggtctcttccgtcaaggtcgacaaccagcgcgcctacaccgtaattcaggcacgtccaactgccggtcttcagcgcctgcgctatctgctgctgctgtggggggctgatcctaacggcgacaagccaatgtcaccggatgaagttcaccgtatcgcaaccgaacgactgatgcagatgatgccgcaggttctgccgccgccgaacgaaatggggccaccggcaccggtgcctgctcctgcgaccggaaccgcaaccacgccagccacaacctcaggtagcagacgatgaacggctaccgcagccacggacgctggataatttggctatcctttgtgatagccatgttattgcaggtcatgccatggcccgaccaaatctacatgttccgaccttcctggttgatgcttatcctgatttattgggtgatggcgctcccgcatcgggttaacgtcggcaccggtttcctggtgggcttcgtgatggacctggttctcggttcaacgttgggggtgcgcgctctggcgttagctatcaccgcgtatctggtggcgttcaaatttcagctgttccgtaacatggcgctctggcaacaggcgctgattgtcatgctgttatcgatggcggtgaacgtgattgtcttctgggccgagttcctggtggtcaacgtgactttccgaccgcagattttctggagcagcgtggttgatggcgtgctctggccttggctgttcttgctgatgcgtaaaatccgccgtcaatttgccgtacaataagggcattatgactttactttatctcgcatcgggttcgccgcgtcgtcgtgaattgttaacgatgctggagctgcccttcgaacgtttaatgaccgacgtggccgaacagcgccaccctgacgaagctcccgccgactacgtacaacgtctggcgctggataaggcgcgtgcaggcgtggccgttgcccctcaggacttgccggtattgggcgcagacactattgtggtacttgatggatgtgttttggaaaaacctgccgatattcagcaggctgctgagatgctggcggcgttgtcaggacgtcaacatcaggtaatgaccgctatagctctcgccgatacccaacaacacctgagtgcgttggttgtgaccgatgtcactttcagaacgctatcatctgaggatatagagcactatatttccagcggtgagcccatggataaagcgggggcatacggtattcaaggaaagggcggatgtttcgtccgtgagatccgcggcagttactatgcagtagtgggactccctctggtcgagacccaagagctgtacagtaattttgttgcactacgcgttcttaggagaaagcatgacggctgaattactggtcaatgttaccccatcggaaactcgggtggcatacatcgacggtggcatcttgcaagagatccacgtagaacgagaggcaaaacgcggtattgcagggaatatttacaaaggtcgcgtgagccgtgtcctgcccggaatgcaggcggcttttgttgatattggtctcgaaaaagccgctttcctgcacgcctcggacatcatgccgcacaccgagtgtgtggcgcgcgaagaacagaaaaacttcaacgtacgcgacatcgtcgaactggttcatcagggccaggatctgatggtgcaggtcgtgaaagatccgctcgggaccaaaggcgcacgtctgaccaccgacattaccctgccttcccgttatctggtctttatgccaggtgcatcgcacgtgggtgtctcacagcgcatcgagagtgaagccgagcgcgaccgcctcaagaaaattgtttctgcccactgcgacgagcagggcggctatatcattcgtaccgctgccgaaggcgtgcgggcagaagagctggcgcaggacgccgcctatctgaaacgcctgtggaccaaggtgatggagcgcaaacgccgcaacgtgaccaagtgcaagctctacggtgagcttgcgctggcgcaccgcgtgctgcgagacttcgccggccaggagctgcaccgcatccgcgttgactcccgtctgacctacgagctgctgctcgagttcaccagcgaatacatgccggagctgaccgacaagcttgagcactacagcggcaagcagcctatcttcgacctctatgacgtcgaaaacgaaatccagcgtgcgctggagcgtaaggtggagctgaagtcgggtggctatctgataatcgatcagaccgaagccatgaccaccattgatatcaacaccggtgcgttcgtggggcatcgcaatctcgaagagactatcttcaataccaacaccgaagcgacgcaggcgattgcccgccagctgcggctgcgcaatctcggtggcatcatcatcattgacttcatcgatatgtctaatgaggaccaccgccgtcgcgtgctgcactcgctggagcaggcgctgtcgaaggaccgcgtgaaaaccggcattcacggcttctccgcgctaggtctggtcgagatgacgcgtaaaagaacccgtgaaagcgtggaacatgttctctgcagcgattgtccaacttgtcacggccgtggaacggttaaaaccgttgaaacggtatgctacgaaatcctgcgtgagattgtgcgcgtgcatcacgcctatgatgcagaccggttcctggtttacgcctccgttgccgtcggtgacgccttgaagggcgaagagtcccatgcgctggccgaggtcgaaattttcgtcggcaaacaggtcaaggtccagattgagccgttatacagtcaagagcaatttgacgtcgtcatgatgtaattcccagaattaactggttatttgtggcctggttttaacgtaggattatcttgcgtagtcgatttcagcgctgaatagaatacaaggagataagtgtgaggcgactgcccgggatactgcttaccagcttcgcgacgattgtagtgatcgtcgcgttggcgatcagtggcttgcgtcttgcattaccccagctcgaccgctttaaacagcctatcgtcgataaaattcagtctatgaccggcgtgccgatcgccctctcgcaggttcacggcagctggcagaccttcggtccgatgctcgagctcagagatttatcggtcaagttgccagagtcctcctccaaagttgaacgcatcacgctggcgcttgacgtctggcagtcgctgcttcacctgcgctggcagttccgcgatctgaccttctacaatcttcagctcgatttaaactctacgctgggcggcgatgacaataaacggagcccgattggggcaaaccgcatcagtgacatcttcctcaagcaggttgaccacttcgacctgcgcaatagccgcattactttcctgacgccgtctgggccgcgtgccgagtttgatatccagcagatgacctggctcaactcgccaaaccgccaccgcgccgagggccagctaggcctgtcgagcttcaacggtcagcacggcatcgtgcagctgcggatggatctcaacgacaacgacggactgctcaacgacggcaaaatctatcttcaggccgatgatatcgacatgaagccgtggttcagccgctggctgcgcagcaacaccgggcttgaaagcgccaactttagtctggctgcgtggctcactctgcgcgacggacaggtgttctccggagatgtgcaggtgaaaaaaggtgaggccgtgtggcacaccgacggccagtcgcaccgacttgatgctgataacctgaccctgcacggcagccgtcagggtaatggctggcaggtgggaacgccgcagttgaacctgcaaaccgacggtcaggactggccgaagggcgccctcaacgcactttatctgccggaaaatggcaccagcggcaatgcccagttcctcggccccgaccagcaggagcagctgcgcctgcgcggcagcaatatccagcttgagcgcattgggccacttattccgacgatttcattcctgaccccggcgctgcttgaacgctggaaagacctgaagcccaccggcagggtcgacaagttggcgctggatatcccgctcaaacagcctgaacaaacgcgcttcaacctttcatggcacgacgtgagctggcagcgttgggagctgctgccgggcgtcaacaattttggcggaacgctgagcggcagtgtgcctcgtggacgcctaaccgttgacctgaacaacagccagctgccttttggcaaagtcttccgcgcgccgctggaaatcggacaggcgagcggtaccttcgactggaccaacaataatgacggctggtcgctgtggtcgcaggacgtcggcgtcaaggcaaccggcctgtgggctaccggcggcttcacctacacccaacccgtcaagggccagccatggctgaaaatcctctctggtattcgcgtctatgacggcggtcaggcgtggcgctacttccctgaaaccctgatgggtaaaggactggtggactatctcagcgcggcgattcaggccgggcaggttgataacgccacgctgagcttcaacggtaaccctcaccagttcccgttcaaaaataacgaaggccagtttgaggtgtgggtaccgctgcgtcattccaccttccagttccagcctgaatggcctgcactgaccaatctggacatcgatctcgacttcctcaacgacggtctgttcatgaaggcggcgcatactcagcttggcaacgtgtcgggcaacaatatcgtggccaacattcctgactatctgaaggaaaagctgttcgtcgatgccgatatcagcgggcagggcagcgacgttggccactattttgaggaaacgccgctgcgtaatagtctcggcgctgcgcttaaggagctgcaaattggcggcaatgtcagtgggcgcttacatttagatatcccattgaacggcaagctggttcgtgcgaccggtggcgtgaatttgcagaacaatagtctttacatcaagcctatcgataacaaagttcagaacctgactggccagttcagctttgataatggcaaccttgagagtaacgctatgaccggcaccctgcttggacagccggtaaacattaactttaaaaccttcgaacagcctgaaaactatgagattactgtcggattgaacggtgactggcagcctgcgaagctgcctggcctgccgaaggcgattgcggcgaagatttcaggcagcgcgaactggaaaagcgcggtggatatcctgctgccgtataaaggctcgccaagttataaggtgactgccgacgccgatctgaagaatgtgagcagtcacttacctaacccgctgaataagacgcctggccacgccttgccgcttagcgtcagcgtgcagggtgatttgcacagcttcactctcaacggcgtgctggcgggtaaagatcgcttcaacagccgctggctgctgggtaaacagctgacgctcgaccgtgcatcctgggaagccaatgccagcaagaccccagcgctgccggcaaccagcagcctgacgttgcatcttcctgcgctcgacggcgaaaactggctggcgctgctgtccccggacaaagcgactcagagcgagaacagcaagctggttggctttggcttcccgcatcagattacggtgaccacgccgcgcctgaccttggccggtcaagggtggaatgacctgatgcttacctcgacgcagagcgatgacggtatgcatatcaaggccaaaggcaaagagatcgacggcacgctggatatgaacagcagcggtccgtggctggcaaatctgcgctatctttactttaatccgcagtggagcacggcgagcggcaacagcggcgatacccagggtacgcagaatccgtttagccgccacctgtctttcgccaactggccagcgctgaatgtgcgctgtgaagcctgctggtttatgggacaaagtctgcgtaaggtcgatgccgatctggctccgcagggcaacctgctgacgttgcgcaatggcgtcatcgacaccggtgaaggccgtcttgacgtgcagggcgactggaaacaagatgcgcaaaaccatgacagcacggcgctcaaaggcacgctgagcggcaagaattttgaccgtgccacttccttcataggcgtgaccacgccgctgaagggggcaccgttcaagatagactttgacctgcactggaaagacgcgccgtggaaaccggatgccaagacgctgaacggcacgatgaaaaccgacttcggtaagggtgaaatcatcaatatgggcggcggtcgtgcggggcagttgttgcgtctggtcagcttcgacgcactgttgcgcaaacttcagctcgacttccgcgatacctttggtaaaggtttctactttgactccatcaagtcgacggcctggatcaaggacggtgttatccacaccaacgacctgttggttgacggtctggcggcggatatcgcgattaacggcaatgttgacctcgtgacccagaggctggatcttgaagcggttattgcgccagagatctccgcgacggtcggcgttgcgacggcgtttgtgataaacccaatcgtcggcgccgcggtctttgccgcaagccaggcgttggcaccgctgtggaacaaaatttcgctgatccgctatcagattgatggcaccatcgagcagcctgaaattcacgagatcctgcgccagtccaaggccgacaaacaggccctgaccacgccagcacgctgagacgggccgcgcagtgttgagaaacctcatactgtgttaggctgtaacttgactttacatgaccaaagagagtgaagaaattatgagtctggccctagtcagtgagcggttactaaccgctaataacctgagtcaacaagacctgttttcggtattaggccagctgtctgagcgccgtctcgattatgccgatctctatttccagtccagttttcacgaagcctgggtcattgaagacagcatcatcaaagacgggtcttacaatatcgatcagggcgttggcgttcgcgccgtaagcggcgagaaaaccggttttgcttacgccgatcagattaccctgaacgcgctgaaccagagcgcgcaggccgcacgcagcatcgtgcgcgaacagggtaatggcaaagcccaccagctgggtgccatcaaccactctcccctttattcactggcagatccgctgcaaagcctgccgcgtgaagagaagattgccctgctgcaccgtgtagataaagcggcgcgtgcggcagacagccgcgtgcaggaagtctctgccagcattaccggcgtgtatgaaagcgtactggttgctgccaccgacggcacgctggcggcagatattcgcccgctggttcgtttgtccgtgagcgtgctggtcgagcaagacggtcgccgcgagcgcggttcaagcggcggcggcggtcgtttcggttatgaatatttccttgaaagcgttgacggtgaagttcgcgctgatgtctatgcccgcgaagcggtgcgtatggcgttggtcaatctgaccgccgttgcggctccggccggaacgatgccggtcgttcttggcgcaggctggccgggggtgctgctgcacgaagcggttggacacgggctggaaggcgactttaaccgccgtggtacctcaatgttcagcggtcagatgggcaaactggttgcctctgaactctgcaccgtggtggacgatggcaccctgcagggccgtcgtggttcaatttcgattgatgacgaaggtgtcccgggtcaatacaacgtgctgatcgaaaacggtattctgaaaggttatatgcaggacaagctgaatgcacgcctgatgggcgttgcgccaaccggtaacggtcgacgcgagtcttatgctcacctgccgatgccgcgcatgactaacacctacctgctgggtgggcagtcaacgcctgaagatattattagtagcgtcgaatacggcctgtatgcgccaaactttggcggcggtcaggtcgatatcacctcgggtaaatttgttttctcgacttcggaagcctacctgatcgagaaaggccgcattactaaaccggttaagggcgcaaccctgattggttcgggtattgaggcgatgcagcagatttcgatggtcgggaacgaccttgcgctcgacaaaggcgtgggggtctgcggtaaagaaggtcagagcgtaccggtcggtgtcggccagccaacgctgaaactggacagtttgaccgtcggcggcacggcctgataaccgggttatttgtgttaccgcaatcaatcaaccgggcgctatttagcgcccggttctcttttacgatgcttgcgatagaccttgctgacttccttgaagtattcgatcaggtaattaatgcacacctgcacctttagcggcagtttgtctttttcggtatgcagcgcataaaccggacgcggctcggactgataattcccaaacagaatctcgacttcccccgaattaatctcgtcaataatccacatcagcggaatataggcaatgccgacaccggcttttagccagcgaataatggtctgcgaatcgttagtcacaaaccgcccctcgggacgaatacggatagcctgcccctcgggtgatatcaagtcgaactggctgtctgggcgtacgctgtattccagccaggagaagttcaccatatccgcaggcgcttcgggcttaccgtgttgaatcaaataacttttagcggcacagactaccattggcatcgagccgagatgtttagaaaacaggctcgaatcctgaagtttgccgacgcggatcacgatatcaagcccgtcagagataagatccggggctggaataccagtaaccagattgacggtcagccccggatactcgacgagcatctgcgcggtcattgcagcaaggacattttgtgccattgtcgaggagctgccgatgcgtaatgtaccggttggtgtgttattaaatgcatataattgctcgtggacttcacgaacgttatgcagcatcttgtggcaaccctgatagtaaatcttcccggcctcggtaagcccaagactgcgagtacttctgtttaatagtttgatttgtaattcattttcaagcttgctgatgctctgactgatggctgaaacgctcatctgaaggcgaggagcggccgcagtataagaaccgctttcaaccacctgagcaaagattgacatgcgttttaatcggtccattgttaagcccagcttaaaagtgattgtgatcacgtaatgttgataacttgataataagcaggctaatatacttgtccagataaaagcctcaagttcggatgcagttaaatcgttttttcttacctccgccgacttttctggcaatccaactttacccctctgcgcaccctttagagattattctctcgaagtgcgctggtattgttgaaaattctgaatcggatccgcgcggtaatgttaaaattaatgaataatatgagggttactgtgcatcactacctttgtggtatgagtctaaggaaatatccatgagtttgcttccggtaatggtgattttcggattgtcgtttcccccggtgttttttgaaatccttttggcgttggcagtattttttatactgcgccgaattctgacacctaccgggatctatgattttgtctggcatccggctttatttaatacggcattatattgctgtctcttctacctaatctcctgcattttcgtctgaggctgtcgtgaaaaacttatcaataaaaataatacgttatgcaataacgtttatcattgtgatcctggccgccatcgcaattttccgcgcctgggtcttttataccgagtccccatggacgcgtgatgccaaattcaccgccgacgtcgtggctatcgcacctgacgttgccggtctggtaactgacgttccggtagaggataaccagctggtttccaaaggtgacgtgctgttcaaaattgaccagccgcggtatcaggtggcactggagcaggcgaatgccgacgtggcttattaccaggcactggccgacgagaaaaaacgcgaagcggctcgccgcgtgaaactcggttctcaggcgatatcaatcgaagcgattgagcaggcgaccaatgacctgcaaactacgatgcaacagcttgcgaaggccaaggcaacggcggctgccgcagcgcttgacctacagcgtaccgtggttattgctcctgccgacggctgggtgactaacctgaccgttcaccctggcgacttcattacccgtggtgaaaccaccatcgcactggttaaagagcacaccttctacgtgctggcctatatggaagaaaccaagctggcgcgcgttaaaaagggtgaccgcgtcgagattaccccactgggcagcaaccgcgttctgcacggccacgtagacagcgtcgcggcggcggtaaccgacagcagcagcaccgcatccagcgatggtctggcgaccatcgacagcaacctcgagtgggtacgtctggcgcagcgtgtaccggttaagatccttcttgatgatatggatgaaaaacacccgtacccggcaggcaccaccgctaccgttgtggttgcaggcgagcacgaccgcgccgagaacggctcctggttcaccaaattcctgcatcgtatgcgtgagtttggttaagagaagataaaatgaatagccagactttcctgcgcatgcgatttgcctgcaagctgacctttgctatcttgggagcgctggtttttgggttttacctgcagttagaaactccacgttggtcggcgatgaccgccgccatcgtggccgccggacccgccatggttgccggcggcgaacccttcgccggtgccattcgccatcgcggaattttacgtgtcatcgggacgtttatcggctgtatcgccgccattgcgattgtcatgaccttcgcgcgtgcacccgccctgatgctgctggtttgctgcctgtgggccggattctgtacctggtggtcgtcgattgttcgcgtcgaaaattcctatgctttaggtcttgccggttacaccgcgctgattatcgtggtgctggcctcgtcaaacctctccgaaacgccgcagtttgccgttgagcgctgtagcgaaatcgtggtcggtatttgtgctgccatcgtcgctgatctgttgttttcaccgcgttcgatcaagaaagacatcgaccgtgcggtagaccagctgatgatcgaccagttcaagctgctcaagctcagcgtcaatcaggccgacaaggaagaaatcgacaaagcctggaacatgctggtcaagagcacgacggcggtgaacggcatgcgtggcagcctgatgatggaatcctctcgctggcagcgggtgaatcgccgtatgaaggcgttgcacagcctgtcgctgagcatgattactcaggcctgtgaaaccttcatcattatgcagaccacgccggagctggtgcctgaagaaatcagactgctggtgaatgaaccggtcgagaatcagcatgacgtgcgccagaggttgaagcgcctgcgccagataggtaatgcgctgcctgccgaaaacatcgcgctgccgctttactcctggattggctctgccagccgtgcgttgctgatgattaaaggcattcacaccaacggcagcatcagcagcaccgagaacaatgtcctcaatactgaggtggtggtcaaaccggcgtcggccgagatgcatcatgcgttgatcaacggtttgcgtaccttcgtggcgagcgccgccgggtgcctgctgtggctgtggaccggctggactgccggctcaggtgtgattgtcattattgcggttatcacctcactggcgatgcgtacaccgaacccgcgtatgatggcgatggacttcatggtcggcatgctggccgcgatacccttaggctccttgctgtataccgttatcatgccggccactcagcaaagtctgttcctgctgctgctgtcgctgggcatcttcatctttatttgtggtatcgaggtgcagaagcgccgcttggggttcttggtctgttggttggcagcatcaatattctggtgttgagcaacccgatgaccttcaacatctcgaccttcctcgacaacgcgtcaggtcaggcgattggctgtataattgcgctggtcgtgctggcggtgattcgcgataaatcacgcgacaagactgggcgcacgttgcttaaccgcttcgtgagcagtgcagtctctgcgttgaccaccaaggcctatcgccgtcgcgagaaccatctgcccgcgctgtatcatcagcttaaccagctgctggtgctattcccgaatgacattggcaaatatcgtctggcgctacagcttatcattgcgcatcaacgactgaagctggcagaagtgccggtaaacgaagagctttctgctttccacaagaggattcgtaataccgccgaccacgtggtgtcatcccagcgtgaaagcaaacgcgagtactattatcagcgtctgttgaaagagatgagtgaatatcagcagaaactggtggagtacgacgcgccaccgaaagtgaccgaaccggtccgtcgactgtgtgacctgctgcataactatcagcgtgcatttctgcaatagcctgctgacccgtaaaacaaaaaggctgacgccctcaaggcgccagcctttttttgtgcttcacatccggcgattacggataggctgaagtggttttcacctgagtcagttgatcctcgggctcgtcctcgtcctgcgggatcaccagtttttgatggcctgacgcaacgccccagtagtagcacaccagcgtgacgataatcagcagcaccatgtcggttgggctggagatcgcgttgatgccgccgtaagtgcccagataggaaagcgccagcaccaccagatagtagaccagtagccacagcgagctgctaacgtcgcgtttgaagttctcgtcctttttgccaaagattacgtaggcggcccaggcaatcaccagaattgggatcaacaggacgttgaccgaccagccgctccagtaaatcagcaggctactggcgataaaggccagcggactgagcagaccaaacaccggtaacttgaacgggcgtttcaggtcaggcaaacgtgcacgcaacacgcccgcattgaccgggccaggcagataggtaaacaccgttgccgaggtaaccgcaccaatcaggccgccccagacctggaactcggagggcagcgtccaggcaatcgccagaatcagcgacaaccacagcgcaccgcgcggaacgccggatttagggtcaaccttggcgaaaatgttgaacagatggccgtttttcgcccaggcaaacagcacgcgtgacgcacccgccagatagatgttgccggttcccgctggagagataaccgcatcgataaggatcaggttaatcagccaggtaatgcccagactgcgcgccagatcggcatacggagactggaagatggttttcagaccgacccagccatgcgcgttcagcaggtccggcggcactgcgcccatgaaggcgaattgcagcaggatgtaaacggcaaagctaataacaatcgccagaatgatggcaattggaatgttacgttgaggatttttcgcctcactggcgaagtccaccgcctgacggaaacccaggtaggcaaagacgatacccgcgccggtcagtgaggagaatacgccgtgcgcgccaccaggattggtgcccggtaccgcgaggttggcaccgtggtaataaccaaacagcgtgatgatgaccatcaccggcacgataaacttaaaggtagtgatgatagtgttgatgcgaccgaagaatttaacgctccagtagttcaacaggaagaagcccaccaacagcaggatttgcatcacgaagccgaggcttgtcgggctgccgtcggtttgacccagtgcgggccaccagtacatcgcgtattggcgtacggcctcgacttcgacaccggcggtactggtgtaggccagcagcgaactgacgccgattacaaaaccaaccacgttaccgtgagtgtattgcgggtaacgaacgaatcccccggcgcgaggaatagccgccgagagttcagcaaacaccaaaccaatcagcatgaccataatcgcgccaagaagccacgcccagcctgttaaccctcctgcgtaacccgagcttgttaatgctgcgtataaccaccctgagccaatcatggagccgacacccaacagggtaagatccaccaggcctaatttttttttcaatgtccctgagtcatagcagtcctctttagggtttaggaaaataactaatgacagaaaccttctctgttaacgttttaagaaaaacatcaatcttccttttttgatgtatgagtcgtatcagcaggaaccgtgccagactgtcaaacaacccatgaaactgtactaattgccgacttatagagtgagttcgcattatttgcgtgctatttattaatcgatttgcaccaatagtgtgcgtgatgtgactgggggatatagcagggatcgtacaaaaattagcagattaaactggggttaagctgtccgaaaagcacagtgggctgagggacttccgctgcggacaggatattagtggctatacttaatcattaattatctttggttttatcgtccttcaaagggacgatcccgctcaggagaaacatcaccatgtcatcccagctcaagaaactttcagaacatgatttgtttaaaacaggctattttgtggcggggcaatggaaaaccgcagcgaaaaccttcgatgtcgaaaatccggcaaccggcgagatagttgccaaagttgcgcgtgccggaaaggccgagaccgaagaggcgatcaaggccgccagcgaagccttcccggcgtggcgcaaacttaccggcaaggctcggtcggagattatccaccgctggtacgaattaatgattgagaacaaacagttcctcggcgagctgatggttgcggaacagggcaagccgttgaaggaagcgctgggtgaggtggaatatgcggccagcttcctgcaatggtttagcgaagaggccaagcgcgccaacggcgagataattccaccggtcaaagcgggctcacgtatcctggccacccgtgagccggtgggcgtggtggcggctattacgccgtggaattttccgctggcgatgctgacgcgtaaactcggtccggcgctcgctgcgggctgtaccggcctcattaaacctgcgaataacacgccgctctcggcctttgcactgttggcgctggcgaagcaggcgggtgtgcctgacggcgtcatcaatggcgtagccggtgatacctcggccatcagcgacgcaattatggctagcagcgctgtacgtaaaatttcgtttaccggctccaccgaggtcggtaagacattggtgcgcaacagtgccgataccatgaagaaagtgtcgatggagctgggcggtaatgcgccctacatcgtctttgacgatgccgacctcgacgccgccattgacggggtactggcctgcaagttccgcaactccggccaggtctgtgtatctatcaaccgcatctatgtacaggacggcatctacgacaccttcgtgaatcgtctcgccgatgaggtcaagaaactgaaggtcggaaacggcatggaagagggcgtcattatcggtccattaattaatattaaaggacttgaaaaggtcgaggaacacgttaaagatgctctggagcacggcggcaagctgttaaccggggacaacgccatcagttgggcggtaacttctaccagccgacggttatcgcgcaggccaatgaccagatgaaggtagcctctgaggagaccttcggcccgctggcggcctgtttccgcttcaaaactgaagaggaagcgattaaacgtgctaacgataccgagttcggtttggccgcttacttctatacgcagaatctgcagcgggtgttccgcgtggccgatgcgattgaaagcggcatgattggtatcaacgaatgtgcgctgtcgaccgaggtcgcaccttttggcggcgtgaaagagtcaggtcttggccgggaaggttcggtgctggggcttgaagagtatttgcaggtgaaaacgctgcatctgggcaatctgtagcccgaaatctgtctattctaaaagtaggtgacaatgagagcagtaaacacgtggggtcgggttcattggctgttggcgggactgttaattatgttctgtggcagtgcgatggcaaaactgagttttttccctcccgcgcaaggagatatcgcgtcgcttaccgcggagaaaaccgtggtgagttacctgcagcagcatcatcgactgccggattattttatcactaagaggaaggcacgcgcggcgggctgggacccacgttcgggcaatctttgtgacgtattgccgggtaaggcgattggcggggatcatttctctaatcgtgagcagacgctaccgtctgcgcccggccgcgtgtggcgtgaggccgatattgactatcactgcggaagacgcggtgccgatcgcgtgctgtttgccaacgatggcctgatttatgtgagtcgcgatcactataagaatgttgttcgggtggagtaaagcgcatgaaaaaagtggtcttcgattttaatcatatccccgatctggcagccttctacgcagatttttctcgccagttcacgctgagtgagcagtttggcgctaaccttgacgcgttgtgggatgaggtcaccggcggtattgctttaccggttgaaattgatttcaccaacctgaacgccggacgtaaacgacgctttggatcgctggttttgctgtttgaagaggcggaagaagagctggacggcgcgctgcggtttaatttatttgagaaagctaagcctaaagcctagtttttaattaaagaactgagtcattggcgcggtagcaaggcggcaggtgagcaagtccccaggcgctgacacaggtcagtgactggggcgagcaagcgcagctacggcttcaggcaagacggttagtctttcgtttccgcgagctctctgaggtactggaagatttgacgataggccttcggtggcttattggcagccttctctttctgcgcgttgcggacaagcgcgcggagctgctgacggtcggcatcaggataaagatccagtaccgcaggcaccgcatcatccccttcttcgaccagacggtcgcgcaatacttcaagcttgtggaacagcgaaacctgctggttatggcggttcttcagcttgtcgagtgcggtctgaattggctcaacgtcgcgtgaacgcagcattttgccgatcagctgcatctgacgacgacggccttctttcttgatcttctgcgccagctcgatagcggcacgcaggtcttcgtcgagcgggatcttgtcgagggagtttttccccagatcgaccatctcggcacccagatctttcagggcttcggcatcgcgtttgatttcactcttgctgacccagatgatctcatcatcttcttcgttgttctcttcaggaacatcgtcgagccagtcttcaattttcttagtcattatggatccttaaaattcttggccgcattatcgcacggttggcaacaaaagacccagtcggaatgcgaaattgtgctaagtctctgttagactcagaagaatatgcagttaatgatcaccatctttttatttaacaccttattcaaaagaagggcgggctgatgaacgtaaccactcaagtggcagagcaacgtaaaacgctggaacaggccgtagcgcaggctctggagttagcgaaagccggttctgacggtgcggaagtggcagtcagtaaaaccaccggtatcgggattagcactcgcttcggtgaagtcgaaaatgtcgagttcaacagcgacggtgcgctcggtattaccgtttattatcaacagcgtaaaggcagtgcgtcctccaccgatctcagccctgacgccatcgcgcgtaccgtacaggcggcgctggatatcgcgcgttacacttctccagacccttttgccggcgtggccgacagagaactgctggcgttcgatgcaccggatctcgacctcttccatccgaccgaactcgacgccgatcgcggtatcgagctagctgcacgcgcagagcaggcagcgctggccacggataaacgcattaccaacaccgaaggcggcagcttcaacagccattacggcattcgcgtttttggcaacagccacggcatgctgaaaagctactgctcgacccgccactcgatgtcggcgtcggtcattgccgaagccgacggcgacatggaacgtgactacgcctacaccatcgctcgctccatcgatgagctgaaaagcccggagtgggtggggcaggaatgcgcgcgtcgcacgctgtcccgcctctcgccgcgcaagctgccgaccatgaaagccccggtgatgttctcggccgaagttgccaccggcctgttcggtcatctggtgggggccatcagcggcggaagtatttaccgtaaatcgtcttacctgctcgacagcctgggcaagcaaatcctgcctgagtggatcactatcgaagagcatccacacctgctgaaagggctggcgtctacgccttttgacagcgaaggcgtgcgcactgagcgccgcaacatcgtcgaagacggcgtgctgcaaacctggctgatgacctgctattccgcacgtaaactcggcctgcagagcaccggccacgcgggcggtattcacaactggcgcattgctggccagggcgatgatttcagtgccatgctgcgcaagctcggcaaaggcctgctggtcactgagctgatgggacagggcgttagcggcgtgaccggtgactactcgcgcggtgcgggcggattctgggtcgaaaacggtgaaattcaatatccggtgagcgaaattaccatcgccggcaacttgaaagacatgctgcgcaacatggtcagcatcggcagcgatatcgagacccgcagcaatattcagtgcggctccattatccttccagagatgaagatcgccggcgaataagctttaaattaaccttccagacagcggcggatcctccgtcgctgcttttcttgctccttgttctacctcaccttctgaacattctttacaaaaatctgatgccatttcggatgtgttgcacctatgttaataatagtcttacaaacaatgtcgttatacccgtcgttcttgaagccttcgcggcgttagccgtcttgctaagcctccaatgactttgggtaaaattctaataaatctaaacaaatggaaggtaagcatgcgtaaacaggtgattgcaatagccgcggttgccctgctgggttggagcgttcagtctctggcagcagatttggaagcggacatggacacgatttctgataactacagtaaggttctaaaaaccgacaataaagctgactttattgctggtctggcaaaaatgaaggcggccgctgaggacgcaaagaaatctaagccaccgaagctcgattccaagccggataacagcccggaaattcaggacttccacaaaggtctggataatctgataagccacatcgacaaagcctccgaactggctaatgccgacaagatggccgatgcgaagaaagaagccgaaggtctgaaggcgattcgcaacgaaaaccacaagaaattcaaataatctcgtcgctaaccttcctccgctaaaaagtgcggggaagggacgttgcactctgcgtcctctccagtcattcccactgcccaaacgcctgacttcccttttccccgccggtaattgcatttttgagaaatggatctgcttggtgtccgccatttccagtttgaactggaaaaagaccgtctacacaccttctcgccatacgagtagggtaagaacagatgaaaggtgagcgccaataaataataggaagcatctgtaaaaggggcagagcagattgttatgaagaatgcacttgaattaaaagatgcgccagcaagaaccgagcaattattggcagatattcagaagatgctgaacgccgaaaatatatttaccaatgacgttcagcagcaaatgttgacctctcacgtaaaagccatggtgctgcgttcaattaccggcgaacctttgccggaggttgataaagacctgtttgatgaaatatcgcctggctcaatgaaaatggcagaagaggttgtcgagatgctgggaaatttaccgattgaagaggcctatttgctctcggttcattttgaagtggcaaaagacaacaacaatgaataaagacaacaacaattaacttagttatcaccaacaacttatctggagagtttaaatatgggacaagtcatcgtagttatcggcgaccgtttaggtaaaggccagaaagttgcagccggtgtggaagcggcaggcggtaaggccgtggtcatccccggcgttgcggctgacatgaagcttggcgacgtcatgaaggcagaaggcgcaaccttcggcatctcgttctgtggcagcggtggcgcaggcgctatcacggcgcagaacaaatatggctacaaggccaagcacggcatgcgttcggttgaagaaggcgtgaccgccatcaacgaaggctgctcggtgctggggtttggttttatggataaagaagagctgggtcagaaattagttgaatcttatatcaagaaaaatggccagccgtaatgaagcagcatttaacttccacggtcagggttgagggaaagggcgaaacaaaggccgcggccttttcttccgcactaagccaggttcaaaaaaccgttctcaaatctactgataatattttgctgcgcattgaaccgcaggacgtcaaggtaattacagcagaagagaagataacccatgagaagtttctgttcttttttctgccaagagaaaggaagagttactacgtggcgttagatattaccgtcaatatgacagtaataaataccgagcaggtcatattcaccaaaaaataaatatccgctgcatgtcaggtagtttcctcggggaggttaatcccgcagcgtagatatataaaatcacaaggataacctgatgtttttaattatcttaattaagtcgcttattatcggcgggctggtggggtcggcgtaggtgcaggggctgcccgtatgttccatgcgcccaccgtgcagggaatgggggcttttcgcacacttggggaacttaactcctgcgagggcgacccggcttcgcatttctcgttcggattaggcttcttcttcaacgcttgggcgtcctccgtggcggccggctccttcacgcaggacgttgaccaccgcatcattccgaactgggctgcggccgtgctgatgatgaaaaatcgcaacgtggccgagaccctgcacgacccgcgcaagatggcgattgcgggcggcatcatcggcatgattgtcgttgccttccttaataccacggcctcggcggtgccacctgcgttacaggtgaccgccatcaaggtgctggttcctgcggcgaacatgctggtgaacaccgtgatgccggtcatcttctggctggccgctattgacgccggtcgtcgctccggtttttggggcaccattttcgggggctggcgcagatgattatgggcaacgcggtgccgggattagtgctggggatccttatcggcaaaggcgtagaagagggcggctggaaccacgtcacaaaagtgatgatggcggcgattatcgccctgttcgtgctgagcggcttcttccgtggctttgacgtgaagctgttacagtctttcctgctggacgtgccgagctggctgaacggcatccataactcactcagtggcaaataacgggagcatgacgatggaagaacaagccaaaacgggtttctggtacgccgaatggtcattcccgatttttgtcggcctgctgtccgccggggtgtttgccggtacccatatgtattatctgtacggcattggtgccttcaatgaagtcgccttcgtgtcgatgctgcgttccggcatggacaccggcgtgtacggcgcggttgccgccttcggtgccagcttcctatttgcacgtatcatcgaaggctcgctggtcgggatcctcgacatcggcggcgctattcaaaccggtatcggtctcggcgttcctgcgctgctgctgggctcgggcattattttcccggtggcaaatttcgccgcctcgctggcaaccggcctgattttgggccttgcggtgggttacatcattattctggcgcgtaaattcaccatcaatcaggggaactcgacctacggcgcagacgtgatgatgggcgcaggcaacgcaaccggtcgtttccttgggccgttgattattctgtccgcaatggcggcctctatccctatcggcctgggttcactgctgggcgcactggtgttctatatctggaagaaaccgctgaccggcggcgcaatcctggggcgatgatccttggggctattttcccggtgtcgctgtagtcgcctcaacaaacggaaatatcgccaatgtacgatttgattctcagacaggctaaagacgttaacggcggccgagtcgatatcgcggtcctcgacggcaagctggccgtcgtgggccagctcgacgacagcgcaaccgcacggcaggttatcgatttgcagggtaaatactggctcagcgcgggctggattgactcgcacgttcactgttattcgaagtcgccgatttatcacgatgagcctgacctcattggcgtggccagtggtgtgacgacggtgatcgatgcgggaagtaccggtgccaatgacgtcgatgatttctaccaactcacccgtcaggccaagacccacgtctttgcttttctgaacatcgcccgcaccggcatcgtcacacaaaacgagctggcggacatggcgcagattgacaaggtcggcgttcgtcaggctatcgccagtcatcccggatttatcgtcggcctcaaggcgcgcatgagcagcagcgtggtcggtaaaaacggcattcaaccgctggtgcgcgccaaggagattcagcaggaaaacgatcgtttaccgctgatggtacacatcggtaataatccgccgaatctggatgagattgccgatcttctggagtctggggacatcatcacccactgctttaacggcaagccaaaccgtattctgactccggaaggccagctgcgcgatgcgataaaacgcgcgctggcgcgcggtgtattgctggacgttggccacggttcggccagtttcagctttgcggtcgcggaagtcgccatcggccaggggattatcccccacaccatcagttctgatatttactgccgtaaccgaattaacggcccggtgcacagcctcgccacggtgatgtcgaagtttttcagcatcggcctcacgctgccgcaggtgatcgactgtgtcacttgccatgccgccgatgccttgcgactgccgcagaaaggccgtctcgaggccggctgcgatgcggacctcacgctgtttgatattgctcatgcgccgcaggtatttgtcgattcgcaggggcagtcggtcaagggtgaccgcattctggtgccgctggcgaccgtcgtcgccggtgagccgctattaacggatgaagggaagtctaaaaatgtcttcagtctatgaaaagtacgatttaaaacaggtgattaacgcctcaggccgcatgacgattctgggagtatcaaccccacgcgccgacgtcgccgaggggttaataccggcctcaaccacttcttcgagatgaaagatctggtgaataaaaccggtgcctatattgcaaagctgcttaacgtcgagagcgccgtcgtggtgtcctgtgcttccgccggtatcgcgcagtctgtcgcggcggtgatcgtcaaagatgacgcctggttactggaaaatttgcatgccgcatccttgaatgtgcctgacgaaatcgtgctgccgaaggggcataacgtcaactacggtgcgcctgttgccacgatggtcaccatgggcggcggtaaggtgattgaagcgggctatgccaatgagtgctctgcggcacagctggcggcggcaatcacaacgcgtacggtcgcggttctttatatcaagtcacaccactcggtgcagaaaagcatcctgtcggtcgaagaagccgctgaggtggcacgtgcccacaatctgccgctgattgttgatgctgccgctgaggaagacctgacctgctactacgaaatgggggcggacctggtgatttacagcggtgccaaggcgattgaaggcccaaccagcggactggtactcggaaagaaacagtacgtagactgggtgaagctccagtctggcggcattggtcgtgcgatgaaggtcggcaaagagggcatcctcgggctgacgcaggcgattgaaagctatatcactctgccgaaaaccagcgggcaggagatggtcgacaagatgacgccatttatcaatagcctgaacgagattagcggtgtctcggcgcgggtggtgtgggatagcgcgggacgcgatatcgcccgtaccgaaatcacctttgacgaggcggcgctgggttggaaaaccaaagccatcgtcgaggcgatgaagaacggcaagattgcgatttattttcgtggctatcgcgccaatgaaggcaagattgacgtcgatgtacgcagcgtgacgccgtcgcagcttgtcaccgtagccgactgttttaaagccctgtttaccggagagaaagcatgaagctgacccccaatttctatcgcgatcgcgtctgtcttaacgtgctcgccggatcgaaaggcaacgcccgtgaaatctacgaagccgcagagggacatgtgctggtgggcgtgttgtcgaagcactacgccaccgtagagcgtgccgtcgcggatatgaaggactatgcggcgttgattgataatgcgctgtcggtcggactgggcgcgggcgatccacgtcagtcacaaatggtgagccagatttcccagcaggtacagccgcagcacgtgaatcaggtatttaccggcgtcgggaccagccgtgcactactcggccagaatgacagcgtggttaacggtctaatttctccgaccggcaaggttggctgggtcaaaatctctaccggaccgctgagctccgaggccagtgatggcatcgttcctgttgatacggctatcgccttgttgaaagacatgggcggcagttcggtgaaatatttcccaatgggcggcctgaaaacccgtgaagaatttgcctgcgtggcgcgcgcctgcgccgagcaggacttttggctcgaaccgaccggcggtatcgatctgcaaaacttcgaccagattatgcagattgcactggatgccggcgtcagcaaaatcattccgcatatttacagttccatcatcgacagcgccaccggcaatacgcgcccggaggatgtccgcacgctgttggcgagtgttaaaaaattgttagcttaaatgcggttttcgggttgtaagtagctgttgtttcgattaaaagcatagagaggaacgatgagaaactggttacgtatttcgggtttaacctcagcgctgctggcagtatctgccgtgccgctgtatgcagcagagaaggccatgacgcacgagacatctcactatgcctatgtaggcacttacaatccgaacggcgaaggcgtttatcgcttcaaggttgacgagaaatccggtgcgctgagtgaccgcgtgctggtgagtcaatttccgaatcaggcacagatggtggtcggtaaagcaggcaaaacgctctacgtcggcagcgaggtcgataactacaacggcggtaagcacggcgctatcgccgcgtatcacatcaaccccgaagacggcagcctgagcctgattaatcaggtcgattcacagggcgcaggcccggtttatctgtccctgacgccagcgggcgatcgtctgctggtggctaactatatcagcggtatcgttgccgtatttccgattgacggcagcggcaagctgggtgaggccagttcggtacatcaggattcaggcccagcggggcaggaaaacctgctgcggcagccgagggcagctttgccatcagcgaccacaatggcccgcacgcccacatgattgcgaccgatccgagcggcaagtttgtgttctcgaccgacctgggtctggaccgcatctatcagtggaagctgaatccgtccaacggccagcttgaggcgaacacgccgccgtttatcaacgcctcgtctccaggcgccgggccgcgccattttgtgttccatcctaatggcagcctggcgttcttgattaacgaagaagcctcggtgctgaccagctatcgcgtcgacaaggccaccggtaccctgagcgaactgcacagcctctcgacgctgccacccaatttcaaaggcactaactttgccgccggaattgtgctgagccacgacggtaagcacctgtacgtcgccaatcgactgcataacagcatcgcgcagattgacgtcaccggcagcggcgagatgcactgggtcggggaagtctggacgcgtggcgactatcctcgcaccctgacgctgtcggtagacggcaaattcgtttacgccatgaatcagcgcagcgataacatcacaagattcaaggttgagaccggcagtggaaaattaatttttgtcgacgactatactgcggttggcagcccgtcgcagatggtgatggtgccctgaaaacagaaggtttatggtgagatttcccaatcaacgattagccgtattgttcgatgctctgcaaacggaaacgctgccgcaggatgagctggcgaaacgcctggcggtgtcgacgcgcaccgtgcgcgccgatgtcacggcgcttaatgaaattattcaacagtatggggcgagctttgtgcacaatcgcggcagcggttatcagctcaggatagacgatgccgcgctgttctctacccttcagcagccgggaaaaccggctaaccctacgccgcgcagtgcggcggaacgggtcaatcgcttgctgatccgttttctgacctcggccttttcactcaaattggaggatctggccgacgagtggttcgtcagtcgaggcacgctgcaaaacgatatgcctgaagtccgtgagcatcttgcgcgttaccatctgaccatcgagactaaaccgcgctacggcatgaagctgtttggatccgaactcgcgcatcgcgcctgcctgaccgacctgctgttccagctcaataacgatgaccaaatcagcccgttccttaaagccgaaagcctcgagtccgaggcgctgcaaccactcaccgactttatgcatcgactgttggcgcggtcgtctatccgcttaaccgacgaaggggaaaaatacctgattctctactgtgcggtggcggtaaaacgcatcgccgggggtatccgctgactgatttcgatgccgaagaggaagaaccggcgatcaagcaggtgtctacgcagcttgccgccgagcttaagcgaatggtagggaaggaaattccggcggctgaagaggcctatctgcgggtcaatattgccgcccgccgtctgcaaagtattctgccgaccgatatcaatgccgacgacgaagagtcgctggtggactacattctctcctacattaatgcgcattataattatgatttacaaggagataaacagcttaggtccgacttgctgacccacatcaaggcgatgattacccgggttaaataccagattaatattccgaatccgctgctcaacaacatcaagcagcactatccgatggcctatgacgtcacgctggccgcggtgtcgagctgggggaaatatacgccgtacagcctcagcgagaacgaaatcggctttttagtgctgcacatcggcgtgggattagagcgtcattacaatatcggctatcagcgccatccgcaggcgatgctggtgtgcgataccggcaattcgaccatcaggatgattcaggcgcaaattagccgcaagttcccacaaatcgtcataactcaggttatttcgctgcgagactatgaaaatctccggcatatcgatgaagattttattatcgccaacgcgcgcgtagcggagcgcaacaagccggtggtggtgctgtctcctttcccgaccgagttccagatggagcagctcggtaaactggtgttggtggaccgcacgcggccctacatgctggagaaattcttcgaccggcaccactttatgcgtctcgaccaacctatgacccaggcccagctgtttcaaaagatttgtactcagctcgagcaggaaggctacgtcgacgaagagtttcacccttcggtggtcgagcgtgaggagattgtttccaccatgctgggtgagggtatcgcgctgccgcattcgttgggactgctggcgaaaaagacggtggtgattacggtcttgtccccgcagggcatcacttggggcgaaggggagacggcgcacgtgattttcctgctggcgatcagcaaggccgactacgaggaagcgatggctatctatgacctgttcgtgacctttgtgcgtgaacggtcgatgagccggctgttaagcagtgagaattttgagagtttcaaggcgattgccatcgactgcttaagccgtatctaggcagaaaggggacagggcttgcaaagacaggccctgtttagcgtattacgctgctcagtcttcgtcgaagcccgagttaatcagattaatgaccgccgccagcgcctcggcctcgtccgggccggtggcctcgatttcaatctcctgacctttgggtgaatcgagcatcagcagggcaatcacgctgcttgcctcggcttcaataccggtatcgttgcgcagcatcacttcagattcaaaactctgtaccagttcaaacagcttcatggccggtcgcgcgtgcatgcccagcctgtttttaatctcgactttctgttttatcgacataatgattaaccgtcatgatttgcgtttttctaacgtacgatggcgggactgcacgttcttcccacgggagcggaaatagtcggcgagctgttcggctacgtaaaccgagcggtgcttgccgccagtacaaccgattgcgacggtcagataactgcgattattggtttccagcatcggtaaccactgctcgagatagctgcgcgtctggtagataaagttgtgcacttcggtatggcggtcgaggaaggcggcaacgggtttatcgaggccggtcatcgggcgcagtttcgggtcccagtgcgggtttggcaaaaagcgtacgtcgaaaacgtagtctgcatcgataggaatgccgtgtttgaaaccgaaagactcaaacaccatcgtcagctcgcgctcacgtttacccagcaaacgggtgcgcagcatctctgccagctcgtgcacagacatttcagaggtgtcgataatcagatcggcgctcgagcgcagtggctcaagcagttcggcttcgtgatcgatggcgctttcgagagagagattcttgctggaaagagggtgcagacgccgcgtatcgctgtagcgacggataagcgtattgcgatcggcatccagaaacagcaactgcggggagaagctgtctggaagctgggtcatggcatgttcgtaaacttcaggcgtctctggcatgttgcggacatcgatgctcacggcggctgacgtattgcgttcagccaactcctgcgcaagctggggcaataacaccaccggcaagttatcaacgcaataaaagcccatgtcttccagcgcacggagggcaacggactttccagaaccagaacggccgctgacaatcatcagcaccatgtgaatactccctcgttaacccaatcttgaatacttcgcgatttactcgtcttcggtaatgatatggtacagctcttcgtcgctttgcgcgctgcgcaggcgacggcataccgctttgtcagccagtttcttggccactaaagacagggtatgtaaatgggttttacattgatctgccggaaccagcaaggcaaaaagcagatcgaccggctgattgtcgaccgcgtcaaaagcgatcggctgatcgagctggataaagacgcccactgcgcgcagcgtgtcttcttcaagttttccatgagggattgcaatcccagcaccaatcccggtactgcccatgcgctcacgggtcagaatggcatcgaaaatcacctgtggcgcgaggtttagctcgttggccgccagctcactaatgatctccagtgcgcgttttttactggcgcaatggacgttgctcttggtgcattcggcttttaataccgaggtcagctgcagtgctgtatcgttaatcatctcattttcacttaggcgccttcaccctaaagagttatcggctcgtaccaggagggtaacgagccgatgattatcactttattccctgccaggaggacagggaagggatcaatgctgtttcagtttgtctttatgcttattaagctgtcgggccagtttatcaaccaggccatcgatagcggcatacatatcctgatgttccgaggttgcatgcaactcgcccccgttcacgtgcagcgtggcttccgcgactttctgcactcgctcaacgctcaatattacgtaaacctggttgattcggtcaaaatattgctcaagtttcgaaaactttgcgttcacaaactctcgcagaggttcagtgatatctacgtgatgtccggtaatgttgagttgcataatgtcttccttctctgttgaggtcaaaccaactgtttacgctgatttgagggcgggattgacaaagactctcggtatttcgctacagtgcgtcgtgccaccatgatgccttgatccgatagcatagtggctaacttgctgtcgctcagaggtttgacggggttttccgccgcgattaatttccttaccagtgcgcgaatagcggtggacgatgcttcaccgccgctgtccgtactaacgtgactggagaagaaatatttaagttcgaaaataccccgtggactgtgcaggaacttttgcgtcgtcacgcgggaaatcgtcgattcatgcatatcaacggcactggcaatatcggccagaaccattggtttcataaattcttcaccaagatcaaagaatgcctgctgctgctcgacaatacaacgtgtcaccttcaataacgtatcgttgcgactctccagacttttaatcaaccacttggcttcttgcaggttactgcgaataaattgcccgtcgctgtcattgcgcaccgaattgcccatcgcagcgtactgctggttgatcttcaggcgtggaatgctgtcggagttcagttcaacggtccagactttgcccactttgcgcaccagcacgtcgggaatgacgtactcggattcgccggtattgatagactgcccaggccttggatccagtgactggatcagcagcatcgctcccttaagtgtatcttcttttaggcgcgttgaacgcatcagggcacgaaaatcgtggttggcgagcaggtctaaatgttcactgacaatcagtctggcttcggtcaggaacaaggtttcgggaacgtattgggagagttgaatcagcaggcaatcgcgcaggtctttggccgctacgccgaccgggtcaaaacgctggactcgtttgagcaccgcctcgacctcgtccatgctgacctcttcatcaccaatgctctcgaggatgtcatcgagggaaatggtcaggtaaccggtgtcatcgacggcgtcgacaatcgaggtggcaatcgcgcggtcggtgtcggtaaacggcgtcagctcgacctgccacatcaggtaatcctgtagcgactgggtcgtttcgccctgataaaccggcagttcgtcgtcgctgtagtcattacctgtacccgacggcgtaccggcggtgtaaatctcgtcccaggtggcgtcgagcggcagctcctcgggcatgtctttctgctcaagggcttcgcgggtatcaagggcttcgctttcgctggtttctttcgcgtctacttcatcatggaggtcagattgttccaacagcggattgctttccagcgccaattgaatttcttgctggagttcaagcgtggacagctgcaacaggcgaattgcctgttgtagttgtggtgtcattgccagttgttggctgagcctgagttgcaaaccttgcttcatatcttgggtttatttccattccgaaaaatttgcgaatcgcatttttaattttacaggcggaaagcctcgcccaggtaaacgcgtttaacctgctcgtcttccagaattgccgcggggtgccgtgggctatcagacgaccctggctaacgatataagcgcgttcgcagacgtctagcgtttcacggacgttgtggtcggttatcagtacgcctagcccgctgtcgcgcagatgctcaatgattttcttgatatcgataaccgaaatggggtcaaccccggcgaaaggttcatcgagcaggatgaattttggattggccgccaacgcgcgggcaatctcgacacgacgacgttcaccgccggagagtgactgcccaaggttatcgcgcaagtgagagatatggaactcttccatcagctcattggcgcgggcgatgcgctgctctttgttgagatcttcgcggatctcgagcaccgccatcaggttgttgaacacgctcaggcggcggaaaatagaggcttcctgcggcaaataaccgatgccgcgacgcgcacgggtgtgcagggggagtaggctgatatcttcatcatcaaccacaatccgtcccgcatcgcgctgaacgataccgaccaccatgtaaaaggtggtggttttacccgcgccgttaggcccgagcaggccgacgatttcacctgacttgactgaaagactgacgtcctcaacaactttgcggcctttgtaagctttagccaggttttctgcgattaatgttgccataagttatcagttactctttttctgacctgcagcagcaggggttttttgctgtagctgagaaggaaccagcacggtggttacgcgtttacccttgtcgctaaaggcttccatctgctgcttctgcaccagataggtgatgcggtcgccctgaacattgctgtcgagctgctcgatataggcctgacccgtcagggtaatcaggtctttatcaacttcataacgcacctgttgggcgtggcccttgataggcttgccgttgtcctgcatctgataaaacgtgaccggattaccgtaaccgttaaccacttcgtggcccgactgaccgttaggacgaacgatggtcgcgcggtcggcgtgcaccagaatactgccctgcttgacgacaacgttaccggtcagcgtcacggtgttggtattaatatccaccgcctgattatcggaggtgatagtcataggttgcgtggtgtcgcttttcaacgccagtgcagggagacttaccgccagcagcgaggtcgtgatcaataggttacggattttgtttttggttttgaatttcataattagtatttaccttttcgatcagctgagcggttttatttcttaagttaccacgcattttcatgccgttagacgtaaaaccggtgccataaatgtagacttcgtcgtctgacgctacgtcctgtgtgaccagattaacctgggcattgtctgtctttattctttgcagctgtgacgttgcaggcgtcaggctgtcgacctgtacgtgaccataaagatacaacattttgtcgttggtcagcttggcgcgatcggaacgcaaggtccaggtcgccagggcattctggtcatacatggtcaccaccggattggtgaaccaggtcagctggtcggcggtgtaatatttcacttcgtcagagaccagtcggtaattcagcttgccagtcgggtcatagaccacggtcacagtgtgctgactctgataagtgggttcctgattattgactgccactttctgcgtcggcgcggtggtgtccgacagcgtccagccaatcagtaccagaaccagcaggcccagtaccagggttatccaaagctttgctttactcatatcgacagccccttggcgtcctccagcttgccctgcgccagcagaatcaaatcgcataattcgcgcacggcaccgcgtccaccggcgattcgcgtcacgtagtgcgccttgggtagaaggatcgggtgagcgtcgtttacggcgacggaaagtcccactttttccatgacaggccagtcaatcaggtcatcgccaatgtaggcaacctgctcaggctgcagagacagtgtatctaacagttcgcggaaggccaaaagcttatctgactggccctgataaagatggcgaatgcccagcgttttggcacgatcttccagtaatttggcattgcgcccggtaataatagccacttcaacatctgaagtaagcaggcagcggatcccgtagccgtcgcgcacgttgaagcttttcagctcctcgccatgatttcccatgaaaatcagaccgtcggacattacgccgtcaacgtcgcaaatcagcaagcggacagctttagctcgctcaagcacctctgcgctaacgggaccatagcaggtatccacattggctgcgcttttactcattcaggcaattccttaagtgacagacccaacaccccgggctgtttaaaacggttatcgtcgatttactcaactgtcggtattacacgacaccggctcgcagcatgtcatgcatatgtaccacacccaacaactggtcgccatcggcaaccatgacgcaggtaatgtgtttgtcctgcatcaggtttagcgcatcgaccgccagcagggaaggacgcacgcgaatgccgcctgtggtcatgacatcagtaattttagcgtcgtttacgttgacacccatatcaaagattcggcgcaagtcaccgtcggtaaagataccttctatcttcatcaggtcatcggtaatgaccgtcattcccagattcttgcgggtaatctccagcagtgcgtcgcgcagggttgcgtcacggctgacctgcgggatctcactgccggtgtgcatgatatcgctgacgcgcagcagaagcttgcgaccgagtgcgccgccggggtgagaaagtgcaaaatcttcggcggtgaaaccacgtgcttccagcaatgctacggccagcgcgtcacccatcaccattgccgcagtcgtgctgctggtcggcgcaaggccgagcgggcaggcttctttcggcactttgacgcagatgtgcacgtccgccgcctttcccatggagctttcagggttggccgtcagacaaatcaggcgaatatccagacgcttgagcaccgggatcagtgccagaatctcgtgtgactcacccgagttggagataaggatgacgatgtcctgcttcgacaccatccccaaatcgccatggctggcctcaccgggatgcacaaagaaagccggggtgccggtgctggcaaaggtcgcagccatcttgcggccgacgtgacctgacttgcccatgcccatcacgattatcttgcctccgcactggaacatcatccggcaggcgcggctaaagtcgtcgttgatgtattgatccagctgttccaggccttctctttcggttaacaggacctgtttaccgacctcgatgaagttaaaatcttcgttattaaatgatgtcatcgtcaaatcctgtgactgggtctgagttgcgcaatatttatacagattctatcaggtctagaaggtcacgctgccgggtacgtagaacagcagcgccagatacgcgacgaacccgcacaacagcagcgcgcccgcaaggtggccaatacggtgtttacgcatcaggcacagtccggtcagcacgacgctgacgaccagcatgacccaataatcacgatgaaacgcatcgggattaaaatgccccggagcgaccagcgcaggcaggccgagaaccaggcacatgttaaaaatgttggcgccgataatgttgcccagcgcgatgtcgtcttcgcctttgatggccccggcgataaaggttgccagctcaggcaggctggtgccgatggcaataacggtcagcccgataaccagttcactgacgccaaaatagcgcgcgatgaccgaagcattgtcgacaatcatgtttgaagccagcggcatgataataaaccccagcgctaaccacaaaaatgctactgtattgcttccatcctgagggagttcagccatttgctcgcgggtcagcgtgtcctgtcccacctgctccgacatcctggcgatttttatcatcagcagcagaaatatcgctgcggcggtaatcagcgcgacgccgtcccatcgacttaactcactgtcgctaagcaggaatccgcagagcacggtcactatcaacattagcgggagttcgcgtcgcaggatatcagaacgcacggaaagtggatgaattagcgcggcgccgcccaaaatcagaagaatattagtgatattcgaaccaatgacgttgcctactgctaaatccatctgaccgttgatggcggcggtggttgatacaaccagttcaggcagggaaattcctacgccgacgaccgtcataccaataataagaggggaatgccgattgagcctgccaggactgcagctccgtacaccaaacgatcggcggcataaactaacagaaacaagccgacaaccattagtacgctagcgagaagcatgaaaaatcctttatttggtataatgcaatgttcgtaagtctggcaaggaaccaaaatgagtttgatcaatctgacatcagacccaccggcctgatagtgattgaatagggttccataatagcgattaccttggcttctgactttctgttttatcgttttttatgcggtcagatgacaaccggcccgcagttggttgattttgaccgtccggacgttaaaagtaaatcaatggcaactttggtaacgcattcgcggtaagtttttgtaaaatgtcgggtgttggcattgtagtttaagccaaagttatggaacgggttctaacataagaggattcttgtgttgtgttcgcccagaggaagagacaaatgagtcagagcgaagcgaatctggttgagatcaagggcatgagtttcatgcgcggcgatcgtcccattttcgaagagataaacatgaccgtaccgaaaggcaaggtaaccgccatcatggggccttcggggatcggtaaaacaaccttgcttcgattgatcggcggacaacttacgccggacagtggggagatctggtttgatggtgaaaacgttcctgcgctgtctcgccgtaagttgtacgaatcccgcaagaaaatgagcatgcttttccagtccggagcgctgtttaccgatctcaacgttttcgagaacgtggcatttccgctgcgtgagcacagtaaccttcctgaagaactgctgcacacgacggtaatgatgaagctcgaagcggtggggctgcgcggtgcggcagaactgatgccggcagaactctcgggcgggatggcgcgccgtgcagcgttggcacgtgcaatcgcgctcgaccccgagctcatcatgtttgatgaaccctttgtcggtcaggaccctatcaccatgggcgtgttggtcaagctgattgacgagctaaaccatgcgttgggtgtcacctgtatcgtggtttctcacgacgtgcctgaagttctcagtatcgctgactatgcttatatcgtggccgctcagcacgttatcgcagaaggcaccaccgaggagctgcaaaataatccagacccgcgtgttcgccagttcctcgacggcatcgccgatggaccggtgcctttccgtttcccggccggtgattataaaaccgagctgcttggatgatggagtagtaaatcaatgttaattagggcgttagcgtcattgggctgcagcggaatagccacctgtgcatcgtttggacgcgccgggcagttgctgtttcgtgcgctggtcggacggccgcagtttgccaaacaatggccattattaatcaaacaactttacagcgtcggcgtgctgtcgctgcttatcattgtggtatccggcctgtttatcggcatggtgctcggcctgcagggttatctggtgctgacaacttacagcgccgaagcaagcctgggcatgatggtcgcactttctctgctgcgtgagctggggccggtagtgaccgcgctgctgtttgccggccgtgccggttcggcgttaaccgccgagattggcctgatgaaggcaaccgagcaaatttcaagccttgaaatgatggcgatcgacccgctgcgtcgggtggtcgcgccacgtttttgggcgggtcttatcagcatgcctctgctgacggcgattttcgtcgcggtcggtatctggggcggatcgctggtcggcgttgactggaaaggcatcgacagcggcttcttctggtcggcgatgcaaaacgccgtagaatggcgtcaagacttgctcaactgcttgattaagagcgttgtttttgccattaccgtaacctggatagcgctattcaacggttacgacgcgatcccgacttcggaagggattagccgggccacgacccgtaccgtagtgcactcgtcactggcggtgctgggattagattttgtgctgacagcactgatgtttgggaattgagccatgcaaaacaagaaaagtgaagtctgggttggagcatttatgctgatcgcattgtgtgccgtggtgtttatctgcctgaaagtggccgatattcgctccttcggctccgatccgacttaccgtatttatgctgatttcgacaacatcggtgggctgaaaaacgattcaccggttaaaattggtggtgtcgttatcggtcgcgttagcagcattacgctggacaaaaatctgtcgccgcgcgtggcgatggacatcgatgacaagtacaaccagatcccggacaccagttctctggctatccgcacgtcgggtttgctgggtgagcagttcctggcgctgaatatcggttttcaggatcctgacatgggaaccaccattctgaaaaatggcggcaccattcaggacacgaaatccgcgatggttctggaagacttgatcggccagttcctttacaaaagcggcggtaaagacgacgccgcgaaatcgggtgatgccgcagcttcgccggacagcaccgccaacccggatgccgccaatgcgccggcagcctcggaaagcgcgcctgctccagcggcaaaaactgctccagcccctgcggctcaaggtaattaagaggaattgttatgtttaaacgtttgatggttgttgcattactgatgattgcaccgctggcggccaacgccgcggcggcggttgataaaaccaatccttacagcgtgatgaacgcggccgctaacgccacctttactcgtctgaaggccgaccaaccgaagattcagcaggatcctaactacctgcgcaccgtcgtgcgtgaagaactgctgcctttcgtgcaggttaaatatgcgggtgcgctggtgctgggtcgttactacaattccgccactcctgcgcagcgtgaagcctacttcagcgcgttcagtgactacctgcaacaggcttacggtcaggcactggcgatgtacaccaaccagtcctaccaggttcagcctgcgcagagcatcccggccggtaccgacatcgtggccattcgcgtgaccatcaccgatccaggcggtcgtccgccggttcgtctcgacttccaatggcgtaaaaatagccgcaccggtgaatggcaggcgtatgacatgattgccgaaggcgtgagcatgattaccaccaagcaaaacgagtgggcggacatcctgcgtcagaaaggcattgatggcttgaccgcgcgcctgaaatctgccgcggctcagccaatcactatccagcagaataaataatgagcggtgaactgcgctttgaatccctacagcagacgctgattcttagcggttgcctggaccgtgaaacgctgcttcctctgtgggagcagcgcgagagtctgctaaggggcgtcacctgtgtcgacgtggcgcatcttgagcgcgttgactcttctgggttggcgctgctggtacacctgcgtgattttgcgggcaagcacggcgtggagctgcagattgccggcatcaccgaccgtttgcgcacgttgattgagttatacaatctgcagggaataattcctctcgaatcggacagttagtcctaccgcgacaagaaattttctgcgataaatcactattcaaatcagagcccctgtctgaaactctcatacaggggctttttgatggtttaagagttggtcggatctctataatatgttcggctattacttcccatacgattaaagattagacgggttttatggaaactaacgaaattaaagacgtgctgatggcagcattggcaatcgaagaagcacacgtaaccggcgacggcagccacttccaggcaatcgtggtaggcgcaatgttcgacggcatgagccgcgttaaaaagcagcagaccgtttacgccccgctgatggaatatatcgctgacaaccgcatccacgcactttctatcaaggcttatacgccagaagagtggcagcgcgatcgtaagctcaacggtttttaaggatacagggatgacgggcacgcgtagctgccggccattttgttatacctgaagtaatttgataacagataagagagcaataatggataaatttcgtgtacagggcggaacccgcctgagtggagaagtcacgatctcgggtgcgaagaatgccgcactgcctattttgttcgccgcactgctcgctgaagaaccggtagaactgcaaaacgtcccgcatttgaaagacatcgacacgaccatcaagctgcttaatcagctgggaaccaaaattgagcgtaatggttcggtgtgggtcgatgccagcggtgttaacgagttccgtgcaccctatgacctggtgaaaaccatgcgtgcttctatctgggcgctgggtcctttggttgcccgctttggccgtggtgaagtttctctaccgggtggatgcgctatcggcgcacgtccggttgacctgcacattaccggtcttgagcagcttggtgcgaaaatcgtgctagaagaaggctacgtaaaagcgaccgttgatggacgcctgaaggctgcccacatcgtgatggataaggttagcgtgggtgctaccgtgactatcatgaccgcagcgacgctggccgagggcacgaccgttattgaaaacgccgcgcgtgaaccagagattgccgataccgcggccttcctgaacgccattggcgcgaagataaccggcgcaggtacggacaaaatcatcatcgaaggcgttgagcgtctcggcggcggcgtacaccgcgtggtgcctgaccgtatcgaaaccggcaccttcctggtggcggcagctatttctggcggcaaagtggtgtgccgtgaaacccgtcctgacacgctggatgccgtactggcaaaactgcgtgaagcgggcgccgacattgaaaccggcgaagactggattagcctggacatgcacggcaagcgcgcgaaagccgtgaccctgcgcaccgcgccgcaccctggcttcccgaccgatatgcaggcgcagttcagcctgttgaacctggttgcagaaggtaccggtgtgattaccgaaaccatcttcgaaaaccgcttcatgcacgtgcctgagcttatccgcatgggcgcacatgcggaaatcgaaagccacacccttatctgtcacggcgttgaaaaactgtccggtgcacaggtgatggcaaccgatctgcgtgcttctgcaagcctggtgctggcgggctgtatcgctgatggcgtgaccatcgttgaccgtatttatcacatcgaccgtggctatgagcgcatcgaagataaactgcgtcagctaggtgccaaaattgaacgcgtgagcgctgccgagtaattcgagcgtttgcgggacaaaaaaaagccggaaggggtaacctttccggcttttttaatgcttgcgatacgagccttagtgctccgggtattcctggatggtcacgttgaggctgattttattgccgttgcggctgataacgaccgggatgactgagccagggcgaatttccgcaacctgatccatggtttcaatcgccgaaatagcaggcttgttgttcacgctgacaataacgtcatgcacctgaattccggcattggccgccgggccgtttggcgtcacctcggtaaccacaatgccttgcagatggtcgaccggtgcggtcgggccgtgcaacggcgagacttcactgccggtaatgccgatataaccgcgaataacccgaccgtcgcggataagcttacccatgactttggtcgccagcgcagtcgggatggcaaaaccaatcccctctggcgtcgcaccgtcgttgctctggtcaaacgacagggtgttgatgcccatcagttcgcccagtgagttaaccagcgcaccgccggagttaccctgattgattgaggcgtccgtttgcaggaagttctgacgtccggaagggctcaggcctattcgaccggtggcgctgataataccctgcgtcaccgtctgcccgatgttaaacgggttaccaatcgccatcaccacgtcgccgacgtgaggcacacgtttgtcgttaatcggaatgaccggcagattggtggcgtcaatcttaagcaccgcaaggtcggtcaggctgtccgaaccaaccagcagcgcgtcaaacacgcgaccgtcttgcagggcgacaataatttggtctgcattattaatgacgtgcttattggtaagaatatagcctttgtcattcatgataacgccggaacccagcgtgcggatttgcaactgattctgggaagagtctcccatattacggttatagacgttgacgacggcaggtgccgcacgacgaactccgtcgttgaagctggcaggttgttcgctgtgggtcgtgaagtcatgctggaaaaaaggctcggcaacggttttacgcagtcgtggaacgaccgccagcagaatagcggcaacaataagaccgatgagtgcggatctcaataacttaacaaacatgggtttatgggggtcgtaagaaaatgtactggaaggatagcatgacttgtttgggcgtagctaagctacgcccaaattatgttaaggcattaacaaataaatattctgccctttacgcatcacgctcagcgccaccaggtctggcttggactgtagcaccttgcgcagagcgtcaagattgtcgattggcgcgcggttaaggccgacgatgatatcaccctgctggaagccgacctgatcggccggggtgcctttcacgacctcgtcaacctgaacgcctttaccggccttggtatcgacgtcgctgagcgttgcgccggtgaacgcttgattgattttgtccagtgagaccggtacgtcagggcttgcgccgagcgttacgttaacgtccatcgccttgccgccgcgcagaatgccaagcttgaccactatgcccggcccttcgctacccaccttagcgcgtaattcggcgaagctgctgagcggctggccgtcgagggtgataataacgtcaccggacttgatgccagccttggcggctccagactcgggcaggacttcattgacgaaggcaccgcgctgactgtcgaggttgaacgccttggcgaggtcggcggtcatttcgctgccgcgaatacccagaagacctcgcttgacctgtccggtctcaatcagctgcttgctaaggtttttggccatgttgatagggatagcaaagccaattcccatgctgccgccctgtgaagacaggatggcggtattgatgcctaccagttcgccctgcaggttaagcagcgcaccgccggagttgccgcggttgatggaggcgtcggtctgaataaagttttccagcccttccaaattaagtccgctgcggcccagcgcagagataatgccggaggtcaccgtctgtcccagaccaaagggattccccaccgcgaccgcgaaatcgccgacgcgcagcttgtcggagtcggccattgggatctgagtcagattcttagggtcttttaactggatgatggcgatgtccgactgttcgtccttgccaatgagcttggcttcgaactcgcggccatcgttaatctgtaccgtaattttgtcggcgttgctgaccacatggttattggtgagcacgtagcccttggcggcatcgataatcacgcctgagccgaggccttcaaacggttggccgtcctgcttctggcttggtgtgtcagggccgaaaaagaatttgaactggggcggtacctggtcgctgggtggctgagtacctgatacctgcacgctgaccacgcccggcagcactttttccagcatcggtgcgaggctcggaagaggttgcccctctaccgccacgggcagggcagcactgacgacctgaaaagaggagaagcttaatccaaggctaatcgccactgcgctgagtaaaaatgatttttttttcatttggattgctctcttgattgaatgccgagggaaactgccagttgatcagccaaaagaagagccagtgacggaggccactggctttaccgtattacttacggcgttgtctttctgttccgcgcagcaggccagatgcgccgtcggaatagtcacgaggcatttcaaccggagcttgatcgttatcggcttccgaaccggtcagacggtagttgaacgggttgtcctgcaatggcatgtctggcaacaggttgttagagcttttcgccatgtgctggtaaagctgacggtagtccgtcgccatgttatcaagaagctcggcgctgcgtgcgaagtgtccaaccagttcctggcggtactcttccagctctgctttgctcttgtctatctcgttttgcatcacttgctgatcgcgtaatttacgattgccaaagcgcatcgctaccgcgccgatggcgataccgaccactaatccaatgagcgcatactcccaagtcataataactcctattattgacaccgttgtcctgttgggctttttggcgtaactttctcaccaatacttttaaacaaaacttttacatggcaagttttacgacaaacagaacaccactataaccgttaacctcgcgttagtggaatcctgcggcaactttcgcaccgttcaacggggccgctttatcccctaagtgcgttaaataccgcgaaatagtggaaaaatctgcgttaaacgtcatgaaatctgcgccatgaatcactgaaaatattttctcagggacgttgattacgatgcaattaaagacaccgctttcttcctatcagactgcacttgatgccggagagttccagccggacgacgttcaaaagcaggcggtgacccgtcttgatgctatttatcaggaattggtcgccaaaaaaccagaggatttgcctgaaagtagcggctggttgggccgtctgttcaagaagagtcctgccaagagcaccattcgtccggttcaggggctgtatatgtgggcggcgtggggcggggcaagacttggttgatggacatgttctaccatagtttgccgggcgagcgtaaaatgcgcctgcacttccaccgcttcatgctgcgcgtacacgaagagctgacccagcttcaggggcagtcggacccgctcgaggtgattgccgaccgtttcaagcaggagacggacgtgctgtgcttcgacgagtttttcgtgtcggacattaccgacgcgatgctgcttgctacgctgctacaggcgctgttcgcccgcggcatcacgctggtggcgacctctaacattccgccggacaacctctatcgcaacggtttgcagcgtgcgcgcttcctgccggcgattgctcttatcaatgaatactgtgacgtgatgaacgtcgatgcgggcatcgactatcgtctgcgcaccctgacgcaggccaatctgtggctgacgccggagtccgggcaaacgctggccgacctcaacgcaccgatgaaacagatgtttggcaagctggccggtaagccaggtgaacaggctccggtgctggaggtgaatcatcgtccactcaaggcgattgcctcggcagaaggggtgttggccgtcgaattccacacgctgtgtgaagaggcgcgcagccagctcgactatattgcgctctcaaggctgtaccacagcgtgattctgcataatgtgccggtcatgaaggccgaccaagaaaatgccgcacgacgttttctggcattggtcgatgaattctatgagcgtcacgtcaaactggtggtctcggccgaagtgccgatgttcgagatttatcgcggtgagcgtctgaagttcgagtatcagcgctgcctgtcgcgtttgcaggagatgcagagcgaagagtatcttgcccgcgaacacctgccataaggttggcgataagatgcgcaggcattgcgcatcttatctacaatagagagagggaaatctacacatttttcaaaaaagggttcgatctttgctgtggacttctctataatcctgcgaccccacgttacaacaaagtttttttcccgaaactttatagtgccggcaatggctattcgaaggggtaggtttgctggactgatggtcgtgtgaacctccaatactattttgtaaactgtgtttgaaaaaatgtagtttataaaaacatataggcgtttgggtgttcgccaacgtgtaacttaaattgggtatgcttttaatgaaaacttttacagctaaaccggaaacagtacagcgtgactggttcgtagttgacgcaagcggcaagaccttgggtcgcctggccactgaactggctcgccgtctgcgtggcaagcataaagcggaatacactccgcacgttgatactggtgattacatcatcgttctgaacgcagaaaaagttgctgtaaccggcaacaagcgtaacgacaagatttattaccatcacactggccacatcggtggtatcaaacaagcgacctttgaagagatgattgctcgccgtcctgagcgtgtgattgagctcgcggttaaaggcatgctgccgaagggtccgttgggtcgtgcaatgtaccgtaaactgaaagtttacgcgggcaatgagcacactcatgcggcacagcaaccgcaagttcttgacatttaatcgggattataggcaatggctgaaaatcaatactacggcactggtcgccgcaaaagctctgctgcacgcgttttcatcaaaccgggtagtggtaacatcgtaattaaccagcgtagcctggaacagtactttggtcgtgaaactgcccgcatggtagttcgtcaacctctggaactggtcgacatggttgagaaatttgacctgtacatcactgttaaaggtggtggtatctctggtcaagctggtgctatccgtcacggtatcactcgtgcactgatggaatatgacgaaaatctgcgttctgagctgcgtaaagctggcttcgtaactcgcgatgctcgtcaggttgaacgtaagaaagtcggtctgcgtaaagcacgtcgtcgtcctcagttctccaagcgttaatttgcctgctgcttcggcagtggactggaaccttggtttcgtcctggcacaacgcaacaaaaacccggtcttgtaccgggttttttttcgtcatttgtttagtttttattatgcttttatgtcaaaaataagtctgaaagccgttgttttttcccgctaattgctccctgaaacacatttccataggaaatcgtctcgtacttccccacagaacgaccaaaatctggtaaactatcacacacttttgcgcctgttcgccgagcagtgaaccttgctgaatttgctggctgtgtttccccgctttggcttatctacgaaactgtgggttacaggtgagatgtgcccgaactacgatgggcacgattattcaggatagcagcctgatagtggctattcgcagtataattctagataaacttggaggttttcatggctgtcgctgccaacaaacgttcggtgatgacgctgttttctggcccgaccgacatttttagccatcaagtacgtatcgtactggcggagaaaggtgtaagtgtcgagatagagcaggtagaaatgggtaacctgccacaggatcttattgacctcaacccgtaccactctgtgcctacgctggtcgatcgtgagctgacccttttcgaatctcgtatcatcatggaataccttgatgagcgtttcccgcatccacctctgatgccggtttatccggttgctcgtggtgagagccgtctgatgatgcaccgcatcgaaaacgactggtactctctgctgcgccaaatcgagcagggttctgctgccgaagctgatgcagcacgcaagcaactgcgtgaagaactgctggctatcgcgccaatcttctcttacatgcctttcttcaaaagcgaagaattcagcctggtcgactgctacctggctccgctgctgtggcgtttgcctgaattgggcattgagctgtccggtagcggctctaaagaattgaaaggctatatgactcgcgtcttcgaacgtgatgcgttcctggcgtctctgactgagcctgagcgcgaaatgcgtttgaacggagcccggggataagttatggagatgacagacatgtctcctcgccgtcctttcctgctgcgtgcgttctacgactggttgcttgataaccagctgacccctcatctggtggtcgacgtgacccagccgggtgtgagcgtgccaatggagtttgcccgcgatgggcaaatcgttctgaatattgcaccgcgtgcagtgggcaatctcgaattgggcaatgccgatgtgcgttttaacgcgcgttttggtggcgttccgcgtgaggtgtttgtgcctatcgcggcagtattggccatctacgctcgtgaaaacggcgcgggtaccatgttcgagcctgaaccaggcctcgacggtgaaggcgtctttgaagagttggaagagcaaaatcctgagccgaccatgtccgtaattgatggcgacctgcctgacaacgcggacgacggtgatgatgagccaccgacaccgcctcgcggtggacgtcctgctctgcgcgtcgtgaagtaaacacctcctcgacgccgttgctgcttaaaagcggcataaaaaaagagaccgcaatgcggtctcttttcacatctacgctgcctgaaaaatcagacctccaggaagcacatgatgccgtctgcggctttgcggccttctgcaatcgccgtcactaccaggtctgaaccgcgaaccgcatcgccaccggcgaagattttcggattgctcgtctggtaaggattgtcgctgctttccggtgccacaatgcggccctgactgtccagctcaacgtcgtgagcggccagccattccatcttgtgcggacggaaaccaaacgccatcactaccgcgtcggcgtccatcacgtgctcagaacctgccacgatttctgcgcgacgacgtccgttggcgtccggcgcacccagttcggtacgtgccattctgacaccagaaacacggccagagtcgttcagctcaatgctcagcggttgcaggttgaacttgaattcaacgccttcttcgcgggcattcttaacttcacggcgtgaaccgggcatgttctcttcgtcacgacgatatgcacaggtcacatcggtcgcaccctgacgaattgaggtacgcacgcagtccatcgcggtatcaccgccgcccagaaccacaacgcgcttgtgttccatgctgacgtaaggttcatgctgctgggcttcataacccatcagctgcttggtgttggcaatcaggaacggcagggcatcgtatacgcccggcgcgtcttcattctccaaaccaccgcgcattgactggtaagttcccacgcccaggaacaccgcgtcgtactcttccagcagggcatccatggtcacgtctttaccgacttcgatattgagtttgaactcgatacccatctcggtgaagatctcgcgacgcttggtcatcacggatttttccagcttgaacgacggaataccgaaggtcagcaggccgccaatctctggatgacgatcgaagaccaccgctttcacgccgttgcgggtcagcacgtcggcacaggccagacctgccggacctgcaccgatgatagccacacgtttaccggttgggtgaacgtgagacatatccggacgccagcccatctcgatcgccttatcgttaatatagcgctcgatgttaccgatagtgactgcaccgaactcgtcgttcagcgtacaggaaccctcgcataggcgatcctgtgggcaaacgcgcccacagacttctggcagactgttagtctggtgcgcaaggtctgcggcttccataatgcgcccttcgttggccagcttcagccagttagggatgtagttatgaaccggacatttccattcgcaataagggttaccgcaggacagacagcggtcagcctgtgatgccgcctgagtagccgagaacggctcgtaaatttctacaaactcaattttacggatcttcagcggcttctttggcggatcaacacgctgtaagtcgacaaattgataaacgttttgactcatcttaacctcttactgcgcttgtacccgcagctctgctgcggaacgactacggtgacccaacaatgctttaacatcactggactttggttttaccaaggcaaatttaggcgcccattgaggccagttcgccaaaatctcttcaccacgggtcgacgcggtcagctgtacgtgttcggtgatcaaaccacgcaaatgctcttcgtgaatcgccaactctgccacatcaaggacttcgaccaactcagggtttacgcgtttacggaactcgccgtcttcgtcgagaacgtaagcgaaaccaccggtcatgcctgcgccgaagttaacgccggtacggcccaggacgcagacgataccgccggtcatgtattcacagccgttatcgccgataccttcaaccacggtaatagcaccggagttacgcaccgcgaaacgctcgcccgcacggcctgccgcaaacattttgccgcctgttgcgccgtacagacaggtgttaccggcaatcacggcttcgtggctgcgatacgccgaaccaatcggagggcgaattgcgatacggccaccggccatgcctttacccacgtagtcgttcgcgtcaccggtcagcatcagctcaacgccgcccgcattccatacaccgaagctttggcccgcggtgccgttgaagttaatacgcactgggtctgccgacatcccctggtcgccgtgtttctcggcaatggcacccgacagggtcgcgccgacggaacggtcggtgttgcgaatatcgaagtagaacgccttgctctgcttcgcaataatgtgcggtgcagcctgttccagaatatctttgttcaactggcctttgtcgaacgacgggttgctctcggtgcagtaaaccgctttgcccggatgcgggtcgcagtcaccagcagcggagacaagtccagcttgttctgcttggcggtgaagccgtcgagctcaaccagcagatcggtacgaccaatcaggtctaccaactggctaattcccagctcggccataatctcacgcgtttcctgagtgatgaacttgaagtagttcgtcacacgttcaggcagaccgtggtagtggttgcgacgcagtttttcgtcctgagtggcaacaccggtagcacagttgttcaggtggcaaatacgcaggtatttacaacccagcgccaccattgggccagtaccaaagccgaagctctcggcacccagaatcgcggctttaatgatgtctacgccagttttcagacccccatcaacctgcaggcggatcttgtggcgcagaccgttggcaaccagtgcctgctgcgtttcaaccagacccagttcccacgggctaccggcatatttcaccgaggtcagcgggcttgcacccgtaccaccgtcgtagccggagatggttatcaggtcggcataggctttcgccacgccggtcgcgatggtgccaacgcccggttcggaaaccagtttgacggaaatcatcgccttcgggttcacctgtttcagatcgaaaatcagctgtgccaggtcttcgattgaatagatgtcgtggtgcggcggaggtgaaatcagcgtcacgcccggcaccgaataacgcagcttggcgatgtatggggtgactttatcacccggcagctgaccgccttcgcccggttttgcaccctgagccactttaatctgaatgacgtcggcgttaaccagatacgccggggtgacaccgaagcgaccggaggccacctgcttgatacgtgacactttgttcgtgccgtaacgcgcagggtcttcaccgccttcaccggagttggaacgacccccgatagcgttcatcgcttcggccagagattcgtgtgcctcagggctcagtgcgccgatagacatcgccgccgagtcgaaacgggtgaacaggccttcggctggctcaacctgatcgacagggataggctcgcctttaggggtgatcttaagcatgtcgcgcagcatggaggccggacgctcgttaaccagcttggcgtactttttgtagtcgtcgtaatcaccgctgttcactgccgtttgcagagactgcacgacatctgggttgtaagcgtgatactcgccgccgtgcatgtatttgagcagaccgccgttgtccagcgtcttgcgtttcagccaggcgcgtttggacaggttctgtagatcctgctggaaatcgctgtagcttgccccgccgatacggctgacaacgcctgggaaacaggcagtgctcaggtctttatgcaggcctacggcttcgaacaaacgtgcgcagcggtaagaagcaatcgtcgagatgcccattttggacatgatcttgtacagacctttgttgatgccgttacggtagttcagcatcacttcacggtaatctttgtcgatgacgcgcgcgtcgaccagcttggccagtgtttcataggccaggtatgggtaaacggcggtggcaccgaagcccagcagcacggcgaagtggtgaggatcgcgggcactggcggtttcaacaatgatgttggcgtcgcagcgcaggttcttctcaaccagacggtactgcaatgcacccacggccataggcgcaggcagcggcaggcgatttggcgcgatattgcggtcggacagcaccagcagaacggcaccttcacgcactttacgctcgccttcgtcacacagtttctgaacgaactgctccatatccatttcggctggatcgaaggtcaggtccagcgtctcggcgcggtagtacttgctgtcgagcgtggtcaactgagtaaagtctgaataaagcaggatcggcgatttaaagctcaggcggtgtgcctgaccttcggcttcgcagaacacgttcatctcacggccaatgctggtcgccagtgacatcacgtgtgcttcacgcagcgggtcgattggcgggttggtgacctgcgcaaactgctgacggaagtagtcataaataatacgtgggcggctggaaagtacggcaaacggcgtgtcatcgcccattgagccgacggcttcctgaccgttttcacccagcacgcgcaggatttgatccagctcttcgctgctgtaggcgaactgtttctgataggtctcgagctgcgtgtcgtccagctcgcgctgacccacctggtcggcaggcaagtcttcaaacggcaccagacgctgaacgtttttctccatccactctctgtaaggatggcggctcttcagatcgttatcggtctcgccggagtggtgaattttaccactgcgggtatcgataaccatcagctcacccggacccacgcggcctttctcaaccacttcgtctggctgataatcccagataccgacttcagaggcgcaggtgatcagtttgtctttggtaatgacgtagcgcgcagggcgcaggccgttacggtcaagattacaggcggcgtagcgaccgtctgacatgacgatgcccgctgggccgtcccacggctccatgtgcatggagttgaagtcgaagaacgcacgcaggtcttgatccatgtccgggttctgctgccaggccggtggaaccagcagacgcatagcgcgcagcaggtccataccgcccgcaaggaacagctccagcatgttgtccaatgaactcgagtcagaaccggtttcattcacaaacggtgaggcgtcctgcagatcggggatcagcggggttttgaatttataggcacgagcgcgagcccactggcggttaccggtgatggtgtttatctcaccgttgtgcgccagatagcggaacggctgagccagcggccagcgtggcacggtattggtagagaagcgctggtggaacaggcaaatggccgattccagacgcaggtctgccaggtcaagataaaagcgcggcaagtcaatcggcatgcacaggcctttatagatgtttaccgcgttggagaagctacagacgtaaaactctttgtctgggttttcgctctcgctgatgcgtttttcaatgcggcggcgcgccatgtacaggcggcgctccatatcacgcggacgccaaccggcaggcgcgttgataaaaatttgttcgatgcgcggcatggaggagagcgcaatcgagccgagaacgtctgggtttgtcgggacatcacgccagcccacaacggacagcgtttcgttcaggatctcttcctcgatgatgcggcggctttcagcagcgcgctcctcgtcgttattaaggaagatcatgcctacggcatagtttttcgccaggcgccatccgcgctcttcggcgatcatccggaagaaacgatccggtttttgcaatgacaggccgcaaccgtcgccagtctttccgtcagaaagaattgcgccacggtgttgcatgcgtgccagtccatgaatggcggtacgtacgaccttatggctaggttcgccttcaatatgggctatcaagccaaaaccacagttatccttctcgtgggatgcatcatataacataacggaacctccccaggctctgcgagactctcacacctacttcgagggagcgtaataacggctgattcagcgttttagcgcactctattggtgcgtttctggctgacatcctccgtcagtggccctcgtgacggttctcacaagtggtatatgacttgttttaatgagggagtcttcaattactgcataaatatgacgagtggtatgctcatcgatcttaactgataaagagtgcttccagcggacttccaacttagcgagaaagcgcgggtaggtcaaatgtgggttgaccgaccgtgaaaaagcactttttgcgatttaactatttgataaatatcaaataaatggttttttagaagccataataacagtgtgggagacgggggtaactgtgagctgtctcactgtagtgcaagctcgaaatctgtgcaccatgctagggcggggtggtttgccagcgttttattctgcgaattatgcccgcgatgtgctttattgctgtttttaatcatagcgtaataatgtgctaacaggggacgcataataagaattattcatagtgtaaagaatgactttatttgcagtaatactgaatagttattctttgtatttggcgctgggacagcaaaggggaaataaagaaaagataaaagcctttaaaggctgagccttggcgatttaaggcggggcgatatttataatcgcgcggtcgggattagtcaataacacccccttttgattcattgcaccaacccacgttcctgtagggtgcaagccctaaaaattcggtctccaatgcgattttttggacaatctcccggacactgttcgcgctacttgcggtatgatttcccctactttattccgaatatgctgggatacagacgatttttctcaaggaaaggctatgaagcaaatcagattacttgctcagtactacgttgacctgatggttaagctcgggctggtccgtttttcgctgttgcttgcctcggcgctggtggtactggcgatgattgtgcaaatggccgtcaccatgctgctgcgcggccaggttgaaagtatcgacgtggtccgttctatcttcttcggcctgattattacgccgtgggcggtctatttcctctccgtggtggtagagcagctcgaggagtcgcgccagcgcctgacgcgtctggtcgacaagctcgaagagatgcgctatcgcgacctgaaattaaatgagcagctgaccgaaaacatcgcccagctgaatcaggaaattgccgaccgtatcaaggccgaagaggcgcgtctggcggtggttgataaactcaagctggaaatgcagcaccgcgaacaggcgcagatagagctcagccaacagtctgccttgctgcgttcgttccttgatgcttcgccggacctggtttactaccgtaatgaagacaaagagttctccggctgtaaccgcgcgatggagctgttgaccggcctcagcgaaaagcagctgataggcctgacgccgaacgacgtctataccccggatatcgccgagaaggtcatcgagaccgacgagaaggtgttccgtcacaatgtggcgttgacctacgaacagtggctggtctatcccgatggtcgcaaggcctgtttcgaactgcgaaaagtgcctttctatgaccgcatcggtaaacgtcacgggcttatgggctttggacgcgatattaccgagcgtaagcgctaccaggacgcgctggagaacgcaagccgggagaagaccacctttatctcaacgatcagccatgagctgcgtacgccgctgaatggcatcgttggcctgagccgtatcctgctcgataccgagctgaacgacgaacagcataactatctgaagactatccacgttagcgccattacgttgggtaatatcttcaatgacatcattgagatggacaaactcgagcgccgcaaggttcagctcgacaacaacccggtcaatttcaccgacttcctctccgaacttgagaacctgaccggcctgctggtgcagcctaaaggactgaagttcgtgatgcagcctgacgtcccgctgccgcacacgctgataaccgacggtacgcgcctgcgtcagattctgtggaacctgattggcaatgccgtgaagtttacccacaaaggggagatagtggtgcgggtgcatcatgacctcgccgatcgcctgtgctttgaagtgcaggactccggtatgggcattcctcaggacgagcaggacaaaatctttgccatgtattatcaggtcaaggaccagaacggcggcaagcctgcgacggggaccggaattggtctggcggtctccaaacgcctggcgcagagcatgggggggatatcaccgtcagcagtgagctgggcaaagggtcgtgcttcacgctgaccgtgagtgcaccgtcgctcgacgagccggaaaaagagattgatgaagacgatatcctgccgcttcccgcgctgaatattctgctggttgaagatatcgagctgaacgtcatcgtcgcgcgctcggtgctggagaagctgggcagcagcgttgaggtggcgatgaccggccacgaggcgctggagatgtttgacccgcacgagtttgacctggtgttactcgacattcagctgcccgacatgaccggattggacgtggcgcgtatcctgcgcgagaaatacgccgcagcgctgctgccgccgctggtggcgctgactgccaacgtgttgaaagacaaaaaagagtacctcgatgccggtatcgatgacgtactgagcaagccgctgtcggttcctgcgttgaccgcaatgatccagcagtattgggatcacctgccggaagatgaatccaccccagaggagtcagaagccatgaagacccatgaagaactgctggatatcccgatgctggagcagtacatcgagctagtgggctcaaagctcatctaccagagcgtggacatgtttgaacgtatgatgccgggctaccttgaggtgctggactccaacatgaccgcgcgcgatcaggacggtattgccgaagaggcacacaaaatcaaaggggcggcgggttcggttgggttgaaacatctgcaacagctagcacaacagattcagacgccttcacttccagcgtggtgggataacgtgcaggattgggttgatgagttaacgcttgaatggcgcaacgacgtgcaaacattacgtgactgggcagcggaagctgaaaaaaaataaccccagcctaggccggggtgcgcgaatactgcgccaacaccagggaaattgttaacccacgtattgttttacttagggtattaatcgcaggtcttggtaattcagtagaagtaagtgtaatacaactttatctactcaacataacaaatatcagcgaatctgttacgagaatcattaaaaactgtgatgtagattaatctttgtctatacaaaagttcaagcgttaatcgcaggaatttttcaataaggtcaatctcatccacagggtgactactcaatagggtgggttttggagagggttcatagtttgagcgaccacttttcatccttcattgtctggtaattactgtttttgaagcagaatgtatcgtgaaaaatgccgcgcaacttactgtaataaatggcataaatttgatatcaccggctgaatcgcgtcaacaggttacaaggtggaaatagcgcggtcagggtgaattaatttcatttttgattctgcttcgaagcaggaggatttggcagggaggaagtgacatttaaggccgaatttggcgatatagtcaccttttgaaacgaaccaaaaggagcatgaatgattagcgtttgttcattttccaaaggtcgatacattagaaacgtaaatatattgattttggacgtggtccagctgtactagtcatttaacagccaaaaaagtgtcattagaagcaatgggaaaccctttggaaaatctggaactctttgatgccattgggcagcgaaaacgtttgttgcgcaacaagtgctgatttttctcacacaatacccgcattgttagcatgtcatgagtaaagagagctagccttatacgcggattcagtgtggatattgataagttggtcagatgagtcatggattgtatcgaatgcttaaatcttttaaaaagacccggttttatcggccctttatctggttaaaaagaggcataattgctttagttagcctctggttagtcgggattgtatttttcaagtttttgcccgtgccgttctccgccgtcatggtggaaagacaggtttcagcctggctaagcggagactttggttacgttgctcactccgattgggtcccgatgaatgaaatatcttcacctatggcgctggccgtcatggcgggtgaggatcaaaaattccctgagcactggggatttgacgtgggtgccattcaggcggcgctcacgcacaatgaggatgaagacgctaatattcgtggcgcttcgacgctttcccagcagaccgccaagaatttatttttatgggacgggcgcagttggttgcgtaaaggtctcgaggcagggctgacggtagggattgaaacggtatggggcaaaaagcgcatcctgactgtctatctcaacatcgtcgagtttggtgacggtattttcggtgtcgaggaggcggcccaacacttcttccacaagcctgccagccgcctgacaccttcacaggctgcgctgcttgccgcagtattgccgaatccgcacctgttcaaggtgaatgcgccgtccgcctatgtgcttcgacgccagcagtggatcctcaggcagatgagccagctcggcggcgatagcttcctgaccgagcactcgctgcgttaggccttttcccaagttataaaaaaggacagcctgctgggctgtcctttttattgctcgacgcgaggttatttcacgtaggtaaaggccgtcgtgacatgcttgacgccgctgacgccagcggcaatcttagccgctgcctgaccctcttcctgagtcaccagacccaacaggaagacttcgccgttttcagtcgtcactttcacgttcgacgatttaacctgatcgctggtcaacagctgagaacgcactttggtggttatccaggtatccatcgaggccgttcccagactgaccgggttgccgaggcggatttcgttatagacgtctgttgcgccgtctaccttcatcgttatttgtttggcagtgctagccatatctgcggtcggtgcctgaccggtcagcaacaccttgcccgaataggcggtcgccacgatacgggctttctttttcaaatcctgattggcattgatggcgttggagacgcgtgcctctagtgtggtgtcatcaacctgagttcccacggtgcgtgggtcggtacccgtttttgttgctacgccagccacgccgacaacggcggcggccacacagccttgtaacaaaagggcgctaagcactacagcaaagaggtaacttgccttcattggatctccttaatcgtcctggtgtggaaatagcgtgttatctattaagtcacagaggcaattaacggtaagcatatgcatttcctgaatgcgcgcgctccgatgagaaggtatacggatctcaacgtcatgcgtgcccagtaatcctgccagctcgccgccgtcatagccggtaagagcaacgatggtcatatcccgtgtcaccgctgcttctactgccttgacgatatcacgactgttgccacgagttgaaatcgccagcaatacgtcgccagcctgtcctaaagcacggacttgcttggcataaatttcttcatgcaggcgatcgttggcgatagcggtcaaaacaacgttatctgcagagagtgagattgcaggaaggctcggacgttcagtctcaaagcgatttatcagacaagcggcaaaatgctgagcgttggctgccgaggttccgttcccacagcaaaggatcttgttgccgttaagcagcgactgcacaagcgtcatcgcagctctcgatatggcatcaggtaaggcttctgctgctgcaatctgagtttggatactttcggtaaagcaggctttgattctttccagcacgttgttttctcgtcagtcaaaggtgttggcacgcagggtaagtcccctacaggtgtccatcagtcttggtactatccttgcgcattgaatgcatctggcaaccattctagctggcgcccagtgatggctaaaacatcaaaacggcaagatgatgtgtcaaagctcgcattgtgttgcgcaagccagaaggccgcagcgcgcaacaggcgctgctgtttagagtatgtcacgctggccgccgcaccgccgaaattcgcgttacgtcggtaacgtacttcaacaaacacccaggtttgctggtcccgcatgacaaggtcgagctcaccggcacgacaggctacgttcgcggcaacaaacaccaggcccgcgtgctcaagataacgtctggcctgattctcgtaattcgcgccaacctgacggcgagtgagtctaattgcattcattgtacgtccttgtacttcaaatacttctccgctagagaaatatcatgatacaggaactaaggtgccctgacggtattgtaaccaaggtagctggcgatgtatcacacaattgctgttggcagacagattcccggtggtgccggagagctggaagccaggcgattgacggatttgggtaaagtgattcgccagattgaaggcgtcaacgcccatcgcgtagaggcgtaccagagagtagtcgttattaaacttgctggtcgcctgctgcatcaaccctgggttggaacctgccagcagcgggatatcgctgaactgcataccttccatctcgagacggtaatccggacccgcacccgcctgatagctgcgtgagctggcatagagtgacggtttcacgcgcgtattgatagacaaatcaatcatcggcttgataagcgtcagctgatcctgcgacgcgacgatgtaaatcgcatcgacgctgcctgaggtatccgaagagcccgcagtgacctgtgcatcggttggcggtgacggaatggtaatgccgccgatggtgacgccttcagacggagccggggtgctgctcgccaacgtgaccggggtaccgctcagacgcagaccgccgccgcggctcacctgctgcttgaggtcggcataggaaccaatggtctgcttcagcacggtttgaccgccttgcttttgccattcatcggcaaaggcctgcgcgatacgatcgccaaaatcaccgccaggtaccatcagcagcggcgtttgcttgtgctgggcaaagatatgtcgcgccgcgtcgcgggcttcatcttccggtgaaagcgcaaaatagcagatgttcgggctgttcggcgcattctccggctgatttagtgccagcacgttcagcgtagtttgtgaagaattcagcgaagtaacctgatctttcagcagtggacccaccaccagcgttgcgccgtcctgcttggcctgcgcaagcagggcaggaagcggttggctgctggtgtcgtacaccttcacctgaacgttggtgtttggcgctgagacgaccgcagctgccggtgcaggtatcgctgccggagcgagtacagcagggcggcggttggcgtgccctgtgcggcggtgacgtcaggagacgaggtgctgacggcggcattggggtcggtcgctggcgcagccgcgggtgccggtgtggcggcaggctgagcgggttgagaaggagcgggtgggttcgcctggccgttaaccgcagcattaaagccctgctcaatcgcgttgccgtaaacctgtgccgggccattcagcggcagcagcagggcgattttttcagttgagcctggcttgaagttgacgacgttgttcagcgccgtcggcagcgttttggcggccgggttgtacgggtagcgtttctgccagtcctggatgccggctttcagcaaggcgggatcttgtttgttggtctgccattggttgagcaggtcgagccagccctgcagcacattttcgttggcgttgatcacgacaccgttgacgtcctgggttgaaagctgggtgagcgacagccaggtggcgtcgatattgttttgatgcgccttgccctgcaacaatggctcctgtgcaatataggcacggatgagcggcaggctggcgtggccctgactggcggtaatcagcgcctgatagtagcgagacttctggtcattggataaaccctcgacgtcgattttgcccagtgcgctactggcagcctgatagtttttctgcgccaccagcagctctgcgccgagcaactgctgttcacgcagctggctggcattcaggctctgctgcggcagatttgccagttggctggcggcttccggcacgcggctttcgcgcaacagggcacgaatcgcaagtaattgccagttagccttgttatcatcactgctctgctgtgcctgtttcagataataatcggcgctgccggtaccggcatcctgcacgctttcagtcggcgtctgtggtgcctggctcgcgcagctggcaagtaacatcgccacaataatggcagggatcaaacgccccgagcgggtacgaaaagtagttgaggaaggcatgctgtttccagtgatgtttttttcaagatgctcaatattaaatcggcaatccggatgaaacaatgaatcaacacgatcaagcagatatttctgcatcaacgctgtatgtggtaccgactccaatcggcaatttgggagacatcacgcagcgtgctttagccgtgctgagcagtgtggatttgattgccgccgaggacaccagacacaccggattgctgctccagcacttcgctatcagcgcaaaaatgtatcctctgcacgaccacaacgagcagcaaaaagccgaccatctgattgcaaaactacaggaaggtcaaagcattgcgttggtctccgacgcaggtacgccgctcattaatgacccaggctatcatctggtgcgccgctgccgcgaggccggtattcgcgttgtgcctctgcctggcgcctgtgcggcaattgccgcgctgagtgcggccggtttgccatcggaccgtttttgttacgagggttttctgccggccaaaaccaagtcgcgtaaagacacgcttcaggcactgattgaagagccacgtaccctgattttctacgaatcgacccaccgcctgctcgaaagcttgcaggatatggtcaccgtctggggacctcagcgctacgtggtactggctcgcgagataaccaagacctgggagtcgatttacggtgcgccggtgggcgaactgctggcctgggtgcaggaagacgaagtccgcaagcgtggcgaaatggtgttaatcgttgaaggccatactccagacgcagaggcgttgcccgccgaagctttacgtaccctggcgctgctgcaaaaggagctgccgttgaagaaggctgctgcactggcggcagaaattcacggcgtgaaaaagaatgcgctgtatcgctacgcgcttgacctacagggtgcggatgaggccgaagaagagtaaggtttgaacgataggtaagcctatcgcgacatcggccctatacatcggcgcgcgaaccccctataatccgcgccggagttgaccagacagtcgccgcttcgttgccgtccctttcgggggagacagatgaaggggaggaaagtccgggctccatagggcagggtgccaggtaacgcctgggaggcgcaagcctacgacaagtgcaacagagagcaaaccgccgatggcccgcgcaagtgggatcaggtaagggtgaaagggtgcggtaagagcgcaccgcgcggctggcaacagtccgtggcacggtaaactccacccggagcaaggccaaataggggttcacatggtacggcccgtactgaacccgggtaggctgcttgagccagtgagcgattgctggcctagatgaatgactgtccacgacagaacccggcttaacggtcaactccactcatcgaataagaccccgcgtcataaaggatattcatccggcatggcgcggggttttgctttttaggatcgccgcctacaccggcaggtcaatcagcaaggcctgaagcggggtacgtgcgatgatagtgagtgtctgttcctgatgaataaaggcaccgtcgccacagaccagactctgcctggtatcgctgttgccacccagcgcatcggcctgaccatgaatcgattgcaggtacgcgcgcggtccgtgaagcgtaaattcctgcttttcaccggctttcagattgagatgatgtatccatacctgctgacgcaattgcaggctgttgtcatcgccggtcggtgaagccagcagcagatggcgttgattgcccactgcgattttctgaatcagcggattttcatgctccgggcaggcgtccagccagagttgcatccgcgtgagcggcttgtttgcactcaggttatgctcgctgtagctgacgttcggctgagtcgataacagcgccgcctcaccgacgctgacgcgcacgctgttgccttcgctgtcgcgatactccgcctcaccctgcaataccagattcagtacgtccacgcgtggataagtgcgcggctgaaagctggcacccggtgcgaggatctcctgattcaggacacgaagagacgcgtagcccatcagtttgggatcaaaatagtgcccaaaggaaaaggtataacgtgcctgaagccaaccaaagtcggcttttccgcactcttgtgctgttctgctcttaatcatggccggtggctcagttaaataaatcgatagataaatggtaagcgtctggacgcatgattgttagccagttaatctggtcgctatattcaaatttcctgacagagaaaaataatggctaaggatcgagcgttaactcttgaagcattgagagttatggatgcaattgaccgtcgaggaagctttgccgcggcggcagatgagctcggacgcgtaccctctgcgttgagttataccatgcaaaagctcgaggaagagttggatgtcgtgctgtttgaccgttcagggcatcgcacaaaattcaccaacgtcggccgaatgctgcttgagcgcggtcgcgtattgcttgaagccgcagacaaactgaccgttgacgccgaggcgttggcgcgcggttgggagacccatatcaccatcgtgtgtgaggcactggccccgcggctcaactttttccgctgattgagaaactggccctcaaggccaatacgcaggtctcgcttatcaccgaagtgctggcgggcgcatgggaaaggctagaaaacggccgtgctgatatcgttatcgcaccggatatgcacttccgctcctcgtctgaaatcaacagccgcaaactctataagctgatgagcgtttacgtcgcggccccggaccatcctattcatctcgaggcggaaccgctttccgaggtaagccgggtgaaatatcgcggcattgcggttgcggatacggcgcgagaacgcccggtccttaccgtacaacttcttgataaacaacagcgtttgaccgtcagcagcctgcaggaaaaacgtctggcgctgctcgccgggctcggcgtggcgacgatgccttacccgatggtggaacaggatattgccgaggggcgtttgcgggttgtgagtgcagaatacaatcgcgaagcggacatcatcatggcctggcgtcgcgacagcatgggcgaggcaaaggcttggttcttaagagaaatccctaaactactcgccacccgataaacgtttccccccacagtgccgtgggggaaacgggttaaccaaaccgcacatcgcgcccgtgggctgcgtctaaatcctgcgccggtcccgtagaaataatgccgtaggggttaatcgttgcgtggctgcggtagtagtgattgcggatgtgcgcgaagtccaccgtctcggcaatgcccggcatctgatagatatcacgcaggaatccgtacaggttcgggtagtcgctgatacggtatctgtcgcacttgaagtgcgtgacatacaccgggtcaaagcgcaccagcgtggtccacaggcgcaagtcggcctcggtcagctgattgccggtgagataacgctgcttctcgagaagggtctcagcacgttccagcgcggcaaatacgccgtccactgcgtcgtcataggcctcctgaccggtcgcaaatcctgctttgtaaacgccattgttgatctgcggatagatccactcattgacctcatcaatcgccgatcgcagcgacggtgggtaataatcgcctgcacgcgcgcccacagcatcaaaagcgctgttgaacatacgcatgatatcggctgattcgttgctaacgatggtttgcagcttcttatcccacaggataggcaccgtgacgcggccggtgtaatcgttttgcgcgcgcaggtaaatctcgtaggcatagttgaggtggtagagcgagtcgcctgtcgctgccgggaaatcggtggcaaaggtccaaccgttttcgagcattaaaggatgtaccaccgaaacaggaatgagatgttcgaggcctttcagcgaacgcatgataagcgtgcgatgtgcccaggggcaagccagcgagacatagagatgataacggtctttttcggcagtaaatcctcccacgccgtgtgggccaggttcgccgtcaggcgttatccagtgacgaaactgcgacgtcgagcgtttaaagtgcccgccggttgatttggtatcgtaccagacgtcctgccatttaccttcgaccagttgtcccatggtgactctcctcttggtcccgaagccgtcgggctatcactttgataaaaagcgaaaataaaatctaataaaggcgaggtgaaaattcacctcgcccgagataatgcctgccgatgattcactgactcaagtatagcctgtcattttcttcaccggctttaggccgtgcggagcttaccagttctttttcagcaggcggtcaatgctgtaagcgcctggacctgaagcaaacagcaccaggaagccgcctgcgatgctcaggtttttcatgaacatcatctggttaacaggaaccgagaagtccacgtggaacagcagcgccgtcagaatcgtgaagatagccgtaataagcgcggtggtacgggtaaagaagccaaacagaatcgccagacccccccaaactcgagcaggatggtcagcggcaggaagaagctcggcacgcctgctgaagccatgtaggccgcagtggcagagtaagcgtgcatttttccccagcctgcaacgataaacaggattggcatcaggatacgggtgaccaccagtgaagcgttttgtactttgttcattatcattgactccgattaacaccaaaaaatttggctttaatattaggttttttttaaggctcaaccggtttgtatcccttgttcagccttgtctgtgttgatggagttgataataagggggaataattcactttgttagcaagtaaaactgtctttagtcatcaaataaactgaattagtttgctaatgatttttggcgggcataaagcggcacaggtaaatatttaataactaaatgaaatagtttcgggcagttagcccgttggccaatctgcccagagaagaaattgcgttttgtgagaataattgatgattcggaaagagatgaggtgaaaaagagcgtaggaatcagtttttggagaaggttttttggaacagacgcaccgttccccataggctaaaggctctttttgaccagcggataaggcgactagggtgtcggatactgtaaatggccaacgcgctagaagcgacgaccagatacttacgcgcatcgacaactttcacccaaacttgatcgagcttggtggttgctatcagccattcttctttggcgaccgcaagatcggcgcgttcgcgctcgatcttgcgtagcaatctggctttttcgattaccggcgagggtttgctcattcgaggtcttccttctccagtaaggcacggtcaatcttgagctgtctgcgagacgcgctgagcaaggttgaacggcgagctttactgatagtccaaatgcccagaataatcgccagcagcagcaggactgccgtggtggtgcccattgccatgagtcgataggccggatcaatcgcccagaataaaacaaccagcaggctcatcaagccaaatgcggtgaaaatcagggtaatgcaggccattagcagcagctgaaaaagattggctttctcttcctcaagttctacaacgaccagcctcaatcgcgtttcaaccatcccgactaaaatcgtcacgatgcgctgagcgctgtcgagtatgccccttcccggaccctgtggtggcgtttttggagtctcagccataattaacggcgagctataagaacgccaatgacaaggccgactgctgcgccaatgccaatgccggtccacggtttgtcgtgaacgtaatcgtcagctttgcctgcaatctctttcgtttgactggcaagtttttcgccggtatcacccagacgtgaacgtgtatctttcagtaagccttctgctttgctgcgcagtttgtctagctcggcttttggcttatccgtagagctttggagcacttcttcaagcgtatctgccaatgatttcagttcagcacgcagattgtcggacgttgagttactagccataattcgtcactccataactttatgataagaatattaaacatagcggattttaacggcagtgcaaatgcgatttctctgggtaatcggttaatatagaacgattaacgtgtcgaaacctcattgagttcatgcagagattcatcaagcttcttctgctgtttagcaattttgtctttgtcgccagtggcctgcgcttttttcaactctcgcgttctttcgttaactttttcctgtttttcggcgattttttgttgtttatctgcctgcaaaccggattccgtgcagtgctcctggctttcagtcaacgctttttgcaaccccgcgatctgctctttgttgttgtgctgatgggcgtattccagctgctgttttatttcttgctgtttagtcgcacaggtttgtgggggcgttgacgcataggctgaagtggccagcgcgatcgccggtaaggccaaaagcgtcgctaaagtggttttcatcatgtcttatccttgttagtaaaaatccttgcaggccagaggcagtcgttttggtaacgcccatacgccgggccgaacggtaaaaacgattttgtaaggtaactatagtgagggggaggcgaattggctattaagcgaactcttaaacagaaagaagtgagaaattatagggaaattgattaaccgaaatgggactggtcacggttaaatttattggcccactcatgggaaggttcatgactgtaaggttgaattttatagccagagggcagaatcgacttcagggtttcctgcgccaaatgctgctgtatggaggagtgaagcttcacaaccaggctgccgttggcaggcgtgatactttcgatctccacgccgcgttggctcagtccctgatacagcgtaaagccatcgggtaagtcttcaccggtatgagcagggctgattttcagcgcgtcgctgttttctggagttttaggaaacgcaataacaccgaccgttgtcagcatcagcagaaccaaaaatgtcagtggccagaggatatagccttttgagaacgcgaatttcaacatgcgtaaaatcctgtcaggcgctgcgagttcatgcatttttgcctttagccacgcgattggcctttttctttttccataacaccaccaccgagcctaagagaccgacgaccagtaacagcagcgggagcagcatcaggcagagcattagttggtcttcatacttcctaaatagcggcgttttgccgatggcatagccaagactggtcagaatcgctatccacaggaaggcgctgatccagttaaaaaactgaaaacgtgcgttactgaggccggataatccggcaatggtcggcaacagtgtgcgaacgaaggctaaaaaacgcccgaccagcagcgccgacagtccgtggcgatgaaacagctgatgcgcgcgttcgtgatactgtacgggcagatgcgctagccacccctgcacgacgcgggagttgccgagccatcggccctgaatgtaactcaaccagcagcccagactggccgccgtggtcagcaggacgagcgtcagtggaaaactcatcgcgcctttggcaatcagtacgccaaccagaatcagcaggctgtcgcccggcaggaaagccgctggcagcaggccattctcaaggaaaataatcgtgaacagcacgatatacaaagtccaaaccagcgaggggttggccaatgtctcgtaatcttgctgccaaagggcatgcatgagtgagctgataatttccatgtggctaagaaactccgtaatgcactaagcccgggatccaagaatgcccgcgattcaagaatgttgctttcgccaaaaggccgtaagaaaactggtctaactgtaacaaagtatcaatcatcgaaacaggcaattctggcgaatagtgggctttggtttaacttttgagggggtttttacacaggctgacattactgcacgaagtttgacagcctgagggccgcgaagtagacagcaggcggctttcagaaagccgccgctaacaaaatggaaagtgaaatacttgttgcgggagagtgccgtttaggcttttttctgaccgagtaccgtagagtcgagatgcacaaccgggttctcggtgtaaagatagcggtcgacgttgaattcgaaatcgtcgctggtggcgcgaaacagcatttgcttggtattttcgagatgttgccacattgccagtttggcagcattgggatcgcggcggatgagcgccttcagaataaggtcgtgatcctcacaccagctttcaatcgatttttcatcaatatgctcgtgcagcttgcgccaataggggttgtgcagacgctggctccacatcttctcaacaatgcttgctaacgcactgttctgcgtggattgcgcaacctgaatgtgaaactgcaggtcccattgtgaatcgcggaaacggtcttcctgacgcgcctgctcctgaatatccatcaggcgtatgatgtcctgtttggtcacctgcgttgccgcgaactcggcaatattgctttcgatgagctgacgcgcctgaagcagttcgaacgggcccgccgacgcaaactcgccttccgagtcggtcaccaccagatttcgttgctggttcgacatcacgtgtatgcctgaccccttacgaacctcaacgtagccttccacttccagcatgatgatcgcctcgcgcactacggtacggctgacgctcatctcttcggagatcaggcgctcggcgggaagtttctcgcccacgggatagacgcctttctccacgcggtcttttagcgtggcagcaagctgttggtaaagacgtctggattcggtcggttccatggttaaggctctttggttagcaaaataagaataaggagaggttgtgactacttgttataccagtatacgagcaattgcgtcatcggggaaagggaatgcccgtcctgacgccatctcttcatagaagactcaggagattaagacgggctaagaaaaaactcaggcttttgccgcgtgcatcggtacggataccgggttaacggcggagcgattttgcagtacggtccagatgatgatagcacccagcaggtcgaagaccgagagggcggcgaacagcgggctgaagccaatggtgtcggccagtgcaccgaccaccagcgcaaacagcgtactggctgtccacgctgccatgccggtcaatccgtttgccgttgccacctcattgcggccaaacacgtctgaagagagcgtgataagcgagcctgacaacgactggtgggcaaagccgccgacgcaaagcagggcgatagcgacgtagggactggtgaacaaaccgatcaggcctgggccaatcatcaataccgcacccatggtgaccaccagtttgcgggacactatcaggttaaccttgaagtatttttggaacaaagttggcaaatatccgccgataatgcagccaagatcggcgaacagcatgggcagccaggcaaacatcgcaatctctttcaggttgaagccgtaaaccttgaacataaacagcgggatccaggcattgaaagtcccccacgcaggttctgccagaaagcgtggcagcgcgatgccccagaattgacggttgcgcagtatttcccggactgacatctttttctgattggtcgtgtgatgctgagtttcctgaccgccgagaatgtattcacgctcttcttcactcagttttttctggtctttcggatgcttgtagaacaccagccagcacagtgcccaaatcaggctcagtgcgccggtgataataaacgccagctgccagctgtgcatcacaatcgcccacaccaccagcggtggcgcaatcatgccgcctatggaagagccgacgttgaaatagccgacggctattgaacgctccttggcgggaaaccattcgctgctggctttgagaccggcggggatcattgccgcttctgccatacctactgcgccgcgtgcgatagccagtccgccccaactgctggccagcgccgtggcggcgcagaacaatgcccacagaatggcgaacatcgcgtagccgaccttggtgcccatgatgtccagcacgtagccggcaacgggttgcatgagggtgtagcaggcggagtaggcggcgataatatacgaatactgttgagtggtgacatgaagttgatcttgtaacgtgggtgccgcaacggcaatagcgttgcgtgtcagataacccagaatggtaccaaccgtcacgagcgcgatcatgtaccagcgtaaccctttgatcttacgcattcaaatctctccaataaaagaagcaagctgtggattgcacgtctgcaggtctcgtcgtcaaggggacaaccatgccgcgtgaaccgctgaacgttgtggcaaacgatcacaacttgatcttcacagggcgaaatcaagataacttgtcatacagatttaaaatttgagtgacatcacaaaatcacttttaaagagtgtggataatagcgctcagaatgatttatgtgacaaaaatatcaaaatcagtgatttatgggtatttttgtgatctgtttcgcaattatcacgccagcaaaggccataaatagcgctggactgtatcttaaattggtgtgataactttgtttaacgcagtgataactcagatcgaactcaggactcaatcaggtctttatcagatcgcaatggaacaagaggaagccaacatgtcgcagtttttaccggaagatttcctgctggacactgaagttgcccgtcgcctgtatcatgaatacgccaaagaccaaccgatatttgattaccattgccatctgccgcctgagcaaatcgcgcagaactatcgtttcaagaatctgtatgacatctggttgaagggcgaccactataaatggcgtgcgatgcgggctaacggcgtggcggaatctctgtgtaccggcgacgcaaccgacaggcaaaagtttgacgcctgggctgctacggttcctcacaccctgggtaatcctctgtatatctggactcatctcgagttacgtcgtccttttggtatcacaggcaagctgctttcaccggcgacggcggatgaaatctgggacaaaacgcaagagcaactggcgcaggacagcttctcggcgcgtgggatcatgcagcagatgaatgtcaaaatggcgggcactaccgacgatcctgttgattcgctggaacaccacaagatcattgctgatgacccctcttttaaaatcaaggtattgccgagctggcggcctgataaagcctttaacatcgatgctcctggatttaatgattatctgcagcgcctgtcgcaggtttctgataccgaaatttcccgttttagcaccctgtgtgacgccttgaaaaaacgcttggatcactttgcggcgcacggttgtaaggtgtcggatcacgcgcttgacgtggtggtgtatgccgaagccgatgagacaacgctggacgggattctgacgcgtcgcctgagcggcaagctgccgactcaacaagaaagtgcgcaattcaagaccgctgtactgctgttcctgggttctgaatatcaccgccgtgaatgggcgcagcagtaccacatcggggcgctgcgcaataacaacaccaaaatgctcgaagttctgggtcctgacgttggttttgattccatcaacgataggccactggccgagccactgtcccgcttgctgggcgcacagggcaaaaacggtggcctaccgaagaccattctttatgggcttaacccgcgcgacaacgaggttcttgccactatggccggcaacttccagggcgagggcgtacgcggcaagatgcagtatggctccgcctggtggtttaacgatcaaaaggacggcatgcagcgtcagatgttgcaactggcgaacatgggtctactgagccgcttcgtcggtatgctgaccgacagccgcagcttcctgtcctatacgcgtcatgaatatttccgtcgcatcctgtgccagatgatcggtcgctgggttgcagagggggaagcgccgaacgacatcaacctactgggcgaaatggtcaaaaatatctgtttcgacaatgccaaagagtatttcggcatcgaactgaattagtcccgcacgtcggtactgaatatcgagagaacatcgtggaatgcgtgcagcagctacggcagagggttaagaggttgtctatgaaaagtacgattcaaattcattccacagataatgttgccgttgcgctgcgtgatttggccgaggggaacagattgaggtcgccggtcaggcgattcagctggttcagccggtagtgcgtggccacaaattcgctcttcgggtcatcgacagcggagagaacatcatcaagtacggtttgccgattggccatgcgcttagcgtaatagccgccggggagcatattcattctcagaatgccaagacgaatctcaatagcctggatgaatatcagtaccagcctgccttcaatcagattcccgggcaaaaggctgacagagaggtctcaatctatcgccgagataatggcttggtcggtattcgcaacgagctatggatagtgccaacggtgggttgtgtaaacggcatcgcccgtatgatccagcaacgtttccttaaggaaaccgcgcaggcggaagggatcgatggcgtacatcttttcactcacccgttcggctgctcacagttgggacaagatcatgaaaatacgcgcgttatgttgcaaaacatggtccgtcatcctaacgccggtgcggtgctggtgattggtctgggctgtgaaaacaatcaggttaacgtgttccgtgagaccctcggtgaggtcgacgaacagcgcgtacgctttatggtgtgtcagaaatttgatgatgaagtcgaggcgggcgttgaacgtctgcacgaactctatcaggcgatgctggtcgataaacgcacgccggggaaactcagcgagctgaagttcgggctggaatgcggcggatcagacgggctgtctgggatcactgcgaatccgctgctcggtcgtttctccgactacgtgatagctaacgggggacttcagtattaaccgaagtgccagagatgtttggtgccgagcgcattttgatgagccgctgccgtgatgaggcgacttttgagaagaccgtcagcatggtcaacgactttaaaaagtacttcattgctcatcagcagccgatttacgagaacccgtcgccgggcaacaaggcgggggaataacgacgcttgaagagaaatcgctgggctgtacgcaaaaggccggtcagagtcaggtggtggacgtgctgaaatacggcgaacgtcttcgccagcctgggctgaatctgcttagcgcaccgggtaacgacgcggtcgcgaccagcgcactggccggagcaggttgccatatggtgttgttcagcaccggtcgtggtacgccttatggcggctttgtgccgaccatcaaactggcgaccaacagcgagctggccaacaagaaaccgcactggattgatttcgatgcgggccgtttgatccacgatacgccgatggatcagttgctcgacgaattcgtctcgttgatcgtagagatagccaacggcaaacagagtaaaaatgagctcaatgattttcgcgaattagccatttttaaaagcggggtcacattgtaacaattgttaaataaggctagcataatgcggcgttttgttaaaaaacgccgcagctttctgcctgtcgtccccgcaatcggtacacaaacagaaggttttttccgggtatcacggggacgtcgcactatgtcgctttactggttcgctcaaggtgttggtttactcgctttttgcgtgggtattaccatgtttttcaaccgtagcgatcgccgttttaaacaacagctttccgcctacagcgccattatcggcgtgcattttatcctgatgggggccaatgccgcaggcagcaccgcgctgctcaacgccgtccgcactcagctggcgctacgcacccgcagtcagtgggtgatgctggtcttcatctcgctcacgcttatcttcggcctcggcaaggccaaacacctgatggagctgctgccggttatcggcacggtggtgagtacctgggcgctgtttcgcaccagcggcatgaaaacgcgctgtatcatgtggtgctcaacctgcggctgggtggcgcataacgtctggctgggatcgattggcggtacgctgatcgagggcagtttcctgataatgaacggttttaatatcgtacgtttctatcggatgcagcggcgcggcatcgatcctttcgcggtcgagacccagctggagaagaaagaagaggcacaggccgaagcagcctgaaaaaacggccctcagcatgaaggccgtgcaacacgtcagttatcgagcttcagcggcggcagctgggcaaaaatgctcagcaatccttcgccccagcctttgcggatcatggcgaaatagggatgatcctcggtgatacggtattgctgcgcggtgctgaaactgtccttaggatagatcatcacgtcgagcggcagaccgaccgagaggttgctgcgcagcgtcgaatccatcgaaatcagggcgcactgcatcgcttgatccagcgccgtatcgtagctcagcacgcgatcgataatcggcttgccgtatttgctttcacccacctgaaaatacggcgtatcgtgcgtggcctcaataaaattgccctgtggatagacgtggaacaggcgcagaccttcgtccttgatttgccccccgagcagcaaattacagctaaagtcggtcattcccccctgattggcaccgctgtcgcgagctatcacttcccgcaccgtttctcccagcaggctcgcggcgtcgtacattgactccacgttaagcatattgggcatctgcggatccagacagcgacgatgcaacaggctgagaatgctctgtgtggtcgccagattgccggcactctgaatcaccatcacgcgttcatcgctctgatgaaagacgtgcagtttgcggaaagtggaaatatggtccaccccagcattggttcgcgagtccgaaacaaaaaccaggccagaggacaatcgcatggccacacagtaagtcataccagttacctatattcagtcagggttgtgatggatcaacggctatttagtgagactttgttcttaagttattggggaacatcgagtatctgcaccgccgcaatagtgtgcatatcttcgcagccgccccctaaccgaatgccgcgcaccgggcaggcatcaagataatctataccgatagcgagtttcaaatgttgattgggctggcaagtattattggtcacgtcaaaactttgccaacgcccgtcgagccaggcctctgcccaggcgtgggtcgccacgtgttcgctgtcctggctatagagatagccgctgacgtagcgcgccggaattgccagactgcgacagcaggcgaggaacacgtgggtatgatcctgacagacaccctgctgggcgctaaacgcctgcgcggcgctgtctttcaccgtcgtggtgcccggactgtaaggcatcttgagcagcagttcacccatcaggttgcacaggctttcatgctgagcctgcggacggtagtagcgcgaggcgaagtcacgaatcgcgccgtcggcgtgggtcagcgcgctggtgcgcagaaagaccagcggggaaagatggccgaagttatcgtcctcggcgttgtcctcaatctcgaccacgccgttggcttcgatagtgatcgcctgatgcggctggtcgagggtcaatacgtgcagcacattgccataggcgtcggtggtgcgcgtggcgtattcaggcaggctaagctcccaagtcaggattttctggtggctcgagttctgcggcgtcaggcgcagatactgggtgctgcgtttgacctgctgagcataggtgtaatgcgtcttatgactgacgttaagtttcattgtgcctccagataggtatggtgaatgctctcggcaatcgcattagtttggctgaggaaatcgttcaaccattggctgagcccaatttcctgaatttcggcgagcgttgagaagcgcagttgggcatggagggtatgagcacgacggcgcggcagattgcccgcggtgccgccgatgagttcgagctgttcggtgataacctcgacgcaggccagcagcgagcgcggcagttcgcggcgcaggatcagcaggtcagagatggtttctctgctaagctgctgtttataaaggctatgaaaagcctcgcgggcgctgaccgctcgcagcagtgtgtccatccgataatattcacgcaccggatcctcgtcggcgtcgagcagctggtttttcgcttcgagcaggcgtgcggtactgtccgcacgctccagcatggtaccgagacgaataaaatacagcgcatcgctgcgcagcaaggtgccaaacatcgcgccacgaaacaggtgggatcgctctttgacccagtcaaagaagctgtccgcaccggcggatcccacgccctgacggcggatctgtttcatctcgatccacgaggcgttaatgctttcccagacttcggacgacaggctgccgcgcaccgcgtgggcattgttccaggccatctgcatgcagctgaaaatgctgctgtggttattactgtcgagcgcaaagaagtgcagcaggttattcatggtgacctgctgataggtttcgttgaacagcgactgggtgccggtcaggaacagcggcaccatcaggtcatggttgctgtcgcgaatcgacatcatcgacagtttgttggtgacgtccatcaggcgagcaatgttttctgcgcgttccagatagcgggccatccaatagagttcactggctgttctgcttagcatgcgtcatcctccaaaacccaggtatccttggtgcccccaccctgagacgaatttaccaccaatgagccttcggccagcgccacgcgggtcaggccgccgggaaccaatcgaatttctgcaccggtaagcgcaaagggacgcaggtcgatgtgccgcggtgccagtccttcctccacgaaggtcgggcaggtcgagagtgccagcgtattctgggcaatatagttgtccggtctggccttgagcagctcacgaaaggtggcgatttccgcctgcgtggctttcgggccgatcagcatgccgtatccgccagcgccgtgaacctctttaaccaccatgtgttccagattggccagcacgtaggagagatctttttctttacgacactgccaggttggcacgttgttgaggataggatcctcagacagatagaagcggatcatctccgggacataaggatagatagacttgtcgtcggcgacaccggtaccgatggcattggccagcaccacgccaccggcgcgatacaccgacaatagtcccggcacgccgagcatcgagtcggcgcggaaggccagaggatccaggaatgcgtcatcgaggcggcgatagataacgtcaaccttgcaaggaccagcggtggtacgcataaacacggcaccttccttgacgaacagatccacgctttcaaccagctcgacgcccatttgctgcgccaggaagctgtgttcgaaataggcgctgttgaaacggcccggcgtcagcaccacgacggtcggatcgttcaccggcgtgctttcacgcagcgtttgcagcaggtgggaaggataacgggaaaccggcgcgatccgctgttcgctaaacaattcaggataaagccgcatcatcattttgcggttttccatcatgtaagagacgccggacggggtgcgcaggttgtcttcgagcacgtaatactcgccgtcaccccgcgaaccatgtcagttcctgcaatgtgcgcgtaagtattccgatgtaaatcaacaccctgcatgcaaggctgatactgctcgttggccaatacctgttcggcaggcaccagacccgccttgaggatcttctggtcgtggtagatatcatgcaggaagcagttcaacgcctgcacccgctggcgaatgcctcggtcgagcatttgccactctttggccggaataatgcgcggcacgctgtcaaaagggatcaggcgttctgcgccgtcatcgtccccgtacacgttaaaggtaatccccacccggtgaaacaacagcgcggcttcctctttcttgcgctgcacggcctgttggtcggcctgctgtaaccattgccagtaggctttgtaatgactgcggtgttgcccttcagccattaacatctcatcaaaaaagggtgaatcggaaaggtcaatattgatcatcatcacctcactgacattacaggctagggttggtgcacaacttccattttggtcaggccctaatcactgatgggccaaaacattaacgcggcaagaattaatacgcataaagtgtgccagcgtgcaaaagcggccgaaaatcgttgaaaaggagggagtatcgcgcttttttagtgcgcatcacggcgcgctttagctaaaaatgagcaaaaaaagtgcaccatttttaagtatggtcgttgatgaagcattcacaagtgaatgaaagaggagggcgaggacaaaaacaaaaaaggccagcgcggaggctgacctttttagaagcaatgaggcttagcgacgaatcgcgatcgcttcaatctcgatgttcacgtcttttggcagacgcgcaacttcaacgcaagagcgagcagggaaaggcgcgttatgctcggtgaagaacgcttcgtaggtggcgttgacggtcgcaaaatcgttaagatctttcacgaaaacggtagttttcacgatatcggccactttcaggcctgcggcttcaacgatagcctgcacgttttccagtgactggcgtgcctgagacgcgatgtcttccgccacgttgccggttttaggatcgacaggaatctggccggaagtgatgatcatgctgccgagatcgacgccctgaacataaggaccgatagctgcaggggcattttctgtactgatttcgcgagacatatgagttccttgttgaattaaaaagccgagtcgtgatgaaaaatcatcaggacagtataaggagcggggaacaataaatcatccccgattcttcgcggcctattcgttattcaggaccacctgatgctcgaactctttctcgcagtacttgcactgcaaatgcacttcattgtgacgattcttcaccgaaaaactcgacgcgaccggctcgaagcgactgatgcagttgccgttagggcagcgcagcacgccttcgatacggtccggcaggctcggttgcagcttcttgactaccacgtagtcatcgatgcgattgaccgtcgcgtgcggcgcgtacaccgccagctgattgacctgtgactcggtcaaaaaggtgttctcaattttgatgatgtctttgcggccaagctcgttggacggcagattcagcccgatggtaatacgctggtctgtctcggtcagtttgaacagagacagcagcttgaaacctatctgcgccggaatatggtcgattacggtgccacacttgatggcttctacctggagtttgttgtcgtgggtcatgatgcgctccttattcgcctgtctctgcgttgagtaccagtgccagcaaggcctggcgtgcgtaaatcccgttaccggcctgctggaagtaccaggcgtaaggggtgctgtcgacgtcggtagtaatttcatcgatacgcggcagcgggtgcagtaccttgaggtgcggctgggcatcggcaagatcggcagcgcgcaggatgaactgggctttcacgttggcgtactctgacgggtccagacgctctttctgtacgcgggtcatgtacagaatgtccagctctggcaccacctcgtcgatactctcgtgcaggctgtactcgatgcctttctcttccagcagattgaggatgtattctggcatcgccagtgcgtccggcgcgatgaagtagaagcggttgccgttaaacttcgccagcgcctgcgccaggctgtgcaccgtacggccgtatttcaggtcgccgaccatcgcgattttgatattgtcgagacggccctgggtttcctgaatggtaaacagatcgagcagggtttgcgtcggatgctggttggcaccgtcgccagcgttgagaattggaataccgtgcgagaactcagtcgccagacgcgccgcgccctcctgcgggtgacgcatcacaatcgcgtcgacgtaggtcccaatcaccgagatggtgtcggccagggtttcccctttcttgccaagcgaggtattgctgccgtcggcaaagccgactaccgatgcgccgaggcgatgaatagaggtctcaaacgacaggcgggtacgggttgaagcttcaaaaaagcaactggcaatcaccttatgtttcaacagttcaggctgcggattggctttcaggctagcggcggtgtccagcaccagctccagctcttcgcggctgagatcgttaattgaaataatgtgtttttgatacagcggattagccattgtcgctctcctttacgatgatagacaaaaaaaagcccctcaatgaggggctttttgcgatcgattaaaaataggtaataccattgggagaggcaacggctgaacgccgccgacaggcactgggttcggtgaagcatcgaagcgcaatgtggtgttgatcatgtcattctcccggcaaattgtggcgcattatacgcgcacatatgctgcctgcaagagggtgacttcacctttttgctttctttgttcggccggtgagcaatcgattggcatcagaccttttcagcgagatgaaaatctttttacgccagcgccgcagcctgcctagacgctcgggggccttgagtttgtgttcaatccataccacctgccaaggctggaggcgcatctgcccgctgaatggctccccgctaatcaagtctttgccctcaacggcgagcttaaagggctgcgactgactgctgatattaaaaatgcagctgatgcggttttccgattttggatcgtaacgctcgaaggcgaagagtttctcgctcaactcaaagattcgctgacccgcctgcggggagaatgccggatgggtgcggcgtatttcgatcaatcttttcaagccgttgaacacttcggatcgtagcgatccttttttctccagctcggcttcaacctcgtcgagatgcagcttcttacggttgatacggcgactcaggccagactgatgcatcccctcgagatcgttctcactgccgagcaggctgtgaatataaatcgccggaacacccataaatgccagcagcagcgactgcgccgccagaaattttcgcgtcttgagctcgacgctatcgtccgcctctgtgatggcgctgagatagttgatattcagctcatacggagaatgcgtgccgtcgccgttgtctttataggacacgcggccctccttgcgcagcgtttcctgggcgagatattttcgctcgtcatcatcaaggaaagtctcggtaggacgcaggccgatgccgtcgtggctggaaaggaagttgaaataggtggttttcgggtagtgcgcctccgcgtttagcccctgtgcccactgagtcagcttgcgggtgtcttcgcgcaggaaggcgtgcagggtcagcggcggcagtgcgaactggtacaccatgtgcgcctcgtcgccttcaccaaagtagctgatgttttcattatgcggcacgttggtttcggtaatgatgcgggtccccggaatgacctcatcgagaatggtacgccacagtttgatgatgttatgcgtctgtgggcggtggatacaggtggtgcccatctccttccagatatagccgatagcatcgagacggatggactgcgcgccgctggccgcgtactgcaatatcacgtcgatactctcgagcagtacctgcggatttttaaagttgatgtctatctggtcttcactgaaggtggtccacaggtagagctcggtgccgtcggccttgataaaaggtgtcagcagtggcgaagcgcgcggacgtacaacgcggctgtagtcgagctctgggttggcttcgataaagtagtcatgatagtacgggtcatctttgatgtagcctttcagccattcgcttgagcgtgatatgtggttgatcacgcagtcaaacatcatgttgaagttggcagagagatgatgaatatcactccacccgcccagatgttcatcgatacggcgataatcaatcacgctgaagccgtcgtcggaactgtaggggtacatcggcagaatatgaatgtcggagataatatctttcaggtgtttctgtgcgaaatgattcagcgtagcgagcggcggtttatccggctgagaaatagtatcgccataggtgatgagatagatattggtgccgtctacccactgcgacgaccggtgtgcaccgtaattccatttctcaccgagatgcagaatttttttaatcagatcgccaatgtgttctttgggatagaccctgctcagcaagctttccaggcgaagcacgaactcgggattcacagcacccataacagttcccttttttattcacatgctaaaaggttagttgataaacagggttgccgagggggaaagcgggttaaaaagtgcaacattgcataaaaaaatgcataaataacgcatagctgaaagccagcccgtcggcacgaccaacgggcttacgcggcattaagcaaatcgtgcttacagggtgccgagcgtggcgaccatcaccgcttttatgctgtgcatacggttttcggcctgatcgaacaccacgctatgcgcggattcaaacacttcatccgagacttccataccgcctttcaggtcgtactcttcggccatctgacgaccgagcgtcgtttgaccgtcgtggaaagcgggcaggcagtgcaggaacttcacgttagggttgccggtcttggcaatcatcgccatgttaacctggtaaggacgcagcaggttgatgcgctctttccaggcctccttcggttctcccatcgacacccaaacgtcggtgtagaggaaatctgccccttgacgcccgtatcgatgtcttcggtcagagtgatcgaaccgccgttttgctcagccagatgtcggcaactttcgaccagctcggcgtcaggccagcaggcggaaggcgcgacgagacgcaggtccagcccgcacagcgcggcggcttcgagcagtgagttgcccatattgttgcgcgcatcaccgagataggcgagagacatttgcgacagagttttacccggcagatgctctttcatggtcagcaggtcggccagaagctgggtaggatggaactcattagtcagcccgttccataccggcacaccggcgtgttcggccaatgtttcaacgatttcctgaccgaaaccgcgatactggataccgtcgtacattcttcccagcacgcgagcggtgtctttcatcgactctttatggccaatctggctgccgcttgggccgaggtaagtaacctgtgctccctgatcgtatgcggcaacttcgaaagagcatcgggtacgggtcgagtctttttcgaagatgagcgcaatgtttttgcctttcaggtaaggcttctcgctgccgtttttcttggcagttttcaaatctgcagagagcttcagcagggtttcaagttctgagggggtaaaatccagcagcctaagaaaatggcgtttacttaacagactcatgtgtctatctccgaaacttatccaatgaattaaaattcaatttatatgtatgaatatgcaattacaaccccaagtaaaaactttatcgtttatgttggaggcaagccgtctgctgtgtgaaaatagcgtctaaacgtcatattgattgaggactgaggcatggcaaaccgtgaattgctagacgaacaacgtgaagagacccgcttaatcatcgaagagctgttggaagacggcagcgatcctgacgcgctttacactattgagcatcatttctcctccgagaaattcgaagttttagagcgagcagcggtagaggctttcaaactgggctacgaagtgaccgatgctgaagagctagaagttgaagatggctcaacggtaatgtgctgcgacgtgataagcgaagttgcgcttaacgccgagataatcgacgcacaggttgagcagctggtggcgctggcggaagctaacggcgtcaactacgacggctggggcacttatttcgaagaccctaacggcgaagacggcgacgaagaagaatacgacgaagaagatgaagaagaagacgaggctgcgcctaagtctaaaagcatcgtcgataaagatgacgacggcaaacgccactaagtctttatattattctgctgcacgtcggtgatacggcgttggaagcgggctcgtcctggttcagcagatgaagaatgagtcgttaagttcaaatataaaaaaagccgacgatgtcggcttttttattgcttaaacattgtgttacagcgttttcagcatggtaacttcgcagtctacgtgcccggtgctgccgagcgcgccgtcgatgtgttcgaaacccaagtgttcatacaacgcaatcgcctgcgtcaggctggcggtggtctcgaggtaacagcgggtaaagccctgtcctttggcgtgggccatggcctgaatcgccagacgttttgccaggccttttccacgcaggctggacatgaaatacatcttctgtagctcacaaatgtcgtcgtcggcacccactaatggggcaacaccgccgccaccggctatctcaccgttgagttcaaccacccagtaggcgtggcgtggccggctgtacatttcacacagcacgtcgagattgggatcggcaaccgtatagcctttatcggcggtcaggccaaattcggccgaaacggtgcgaatgacgcgtgcaatatcggcattgtcatcacaggtaatgcggcgcaccacgacatcttgctctgttgaattaatcactgctgtcgtcatagattctttgtctaatgaaagttagatgaggtatcgcttcgcttttcttttgcatttaataccgcgagcgggcgttttttgcaatgcgaaaaaaaacggcggagctttcactccaccgttttctcgtcattaccttagcggccagaattacagcgcggcgatggtggcctgctgttcctgaatcttcaccttggcttcggcacaggcctgcagtctctcgcgctctttcgcgacaaccgcttccggggcacgcgccacgaagccttcgtttgaaagcttggcttcgatacgctcaacctctgcgtccagcttggcaatctctttgcacagacgttccagctcggcttctttatctaccagaccggccattgggatcagcagctctgcgccctcaaccagcttggtgacagaaaccggacctttgtcgccggcaggcagcacggtgatggactccagacgcgccagtgatttgatgaagctcaggttctgctccacgcgacgctgtgcatcggcgcttgcgccacgcagcagcagttcgagtggtttacccggagcaatattcatctctgcacgcacgttacgaatagcgacgatcgcctgcttgatccactcgaggtcgaccagcgcgctttcatcggctttatccgccgagtactctgggaaaggctgcagcatgatggtgtctgcggtaatgcctttcagcggtttcacgctctgccagatggtttcagtgatgaatggaatgatcggatgtgcaaggcgcagcagaccttccaggacctcgaccagcgtgtgacgggtgccgcgaagctgtgcttcggtgccaccgttcatcaccggcttcgccagctccagataccagtcacagaactggttccaggtgaattcatacagaatgctcgctgcgaggtcgaaacgatagccgtccaacgcttcgcggtaggctttcaccgtacggttatattcagccaggatccagcggtcagccagagacagctgcagttcgccgccgttcaggccacagtcttgattttcggtgttcatcagcacgaagcggctggcgttccacagcttgttacagaagttgcggtagccttcgagacgcttcatgtcccagttgatgtcgcgaccggtcgaggccagtgccgccagcgtgaagcgcagggcgtcggtgccgtgcggttcgatgccgttcgggaactgcttctcggtgcgcttgcggattttttccgccagctgcggctgcatcatgttgccggtacgtttttccaacaggtcttctagcgagataccgtcgatcatatccagaggatcgatgacgttacccttggacttagacattttctgcccttcgtcgtcgcggataaggccggtcatgtacaccgtgttgaacggaacctgcggcttgccattttcgtctttcacgaagtgcatggtcatcatgatcatgcgtgctatccagaagaagatgatgtcgaagccactgactaccacgcttgaagggtggaaggctttcaggtctggcgtttcgtttggccagcccagggtcgagaaggtccacaggccggaggagaaccaggtgtccagcacgtcttcgtcctgattcagcacaacgtctgcacccaggctgttttcacgacgcacttcttcttcgtcacgacctacgtagactttgccttctgcgtcgtaccaggccgggatacggtgaccccaccacagctgacgagaaatacaccagtcctgaatgtcgcgcatccagctgaaatacatgttttcgtactgttttgggacgaactggatttcgccttgctcaaccgcttcaacggccacttttgccagcggggcagtgcgcacataccactggtcggtcagcattggctcgataacgacgccgccacggtcaccataagggatggtcaggtcgtgcggtttgatctcttcgagcaggccaagttcgtcgaaggcagccacgatggctttacgcgcggcgaagcgctccaggccacggaactgttctggaatttcgttgctgcacgcatcgctttcttcgcccttggtgtcgaacacctcggcggtctggcggatgtcgccgtcgaaagtcaggatgttgatcatcggcaggttgtgacgtttaccgacttcgtagtcgttaaagtcgtgcgcaggggtgattttcacgcagccggtgcctttttccatgtcggcgtgttcatcgcctacgataggaatacggcggcctaccagtggcaggataacctctttaccgatcaggtctttatagcgtggatcttccgggttaacggccacgccagcgtcaccgagttcggtttctggacgcgtggtcgccaccaccaggtagtctttaccgtcggcggtcttgacgccatcggccagcggatagcgcaggtgccagatggagcctttggattcgcggttttcaacttcgaggtcagaaatggcggtacgcagtttcgggtcccagtttaccaggcgcttgccgcggtaaatcaggtcctctttgtacagacgtacaaacacttcgcgaacggcgttggacaggccttcgtccatggtgaagcgctcacgctcccagtccacggagtcgcccagacggcgcatctgacgcgtgatggtgccgcctgattctgatttccattcccagattttgtcgataaaggcttcgcgaccatagtctttacgagttttgccttcttcagcggcaatcttgcgctctactaccatctgagtggcaataccggcatggtcggtccccgcctgccacagagtgtttttaccctgcatgcgctgatagcggatcatggcgtccatgatggtttgctggaaagcgtgacccatatgcaagctaccggtaacgttcggcggcgggatcatgatgcagaagctttccttactggtatcaccgttaggcttgaagtagccctgttcttcccagtgctcgtaaagcggttgctcgatatcttgcgggttatatgtcttatccatttcgcttcgttagtctgtagtcgttgtattgacgtcgggcggtgtcgccgtggtcaaattgaagccgacgctgcgataggctttgtagcgttcgcgcgccaactgctttaaagaatcttcgtaaggaacgaagtctaccacttcatggaaagcggtggcaaaatctgcaaaattcccgagcaggctaatcagcaaatctcgcggcgcatttccgcgttttccgggccagcaaagctcgacgggggcaccaaatctcgggccttctcccgccagattgtgcggcacaaactggtcggcatcacgtttccacagcgcttcatccagacgttccgcttgtttctggtcttcgcaggcaataagcacgcgttgacccgcacggtagcgctgtgccgcaatctggcacgccagtgcctcgtggccgctgagctcgcctgcgacgtccggtgagtcgagaagaaaaaatgtagcctgtttcatgagtgtcttcctaacgccgtcctccggcgtgaatcacagcgaaggacgggttttaccacaataggcgattaatcgtcgccgttgagacctgcacggttcaacaagaactgggacagcagagaaacagggcgacccgtcgctcctttgttcttacctgagcgccatgcggtaccggcgatgtccaggtgagcccagttgtacttgtcggcaaagtgagacaggaacatgcctgcggtgattgcgccgccaggacggccgccaatgtttgccatatcggcaaagtttgactgaagctgttcgtcgtactcgtcgcccatcggcaaacgccacgcacggtcaccggcctgttcggaggcggtgataagctcgtgggccagcgggttgtggttcgacagcaggccggtgatgtgatgacccagcgcgatgacgcaggcgccggtcagcgttgccacgtcgataaccagctcaggatcaaaacgctcaacgtaggtcagtgcgtcgcacagcaccagacggccttcggcatcggtattcagcacttcaacggttttgcctgacatggtggtcagaatgtcgcccggacggaacgcgcggctgcccggcatgttttcacatccggccagaacgccgactacgttcaacggcagcttcagctcggcaacgacgcgcatgacgccatacaccgtggccgcgccacacatatcgtacttcatttcgtccatgtcggccgcaggcttgatggagataccgccggaatcgaaggtcaggcctttaccgaccagcacaattggcttagcgtctgggttcggattacctttatattccatcaccgacatcagcgactcgttctgcgagccctgacccacggccagataggcgttcattcccagctctttcatctgctgttcgccgatgacgcgggtggtgatattagtgctgaacgcatcggccagctggcgagcctgtgaggccagataagcggcgttacagatgttcggcggcatgttgcccagatctttcgcggctttaacgccgtaagagatagccagaccgtgtgcaatggcgcggtcaccgctgttaagttcgcggcgggtcggcacgttgaagaccattttacgcagcggacggcgcggctcgaccttgttgctcttcagctgatcgaaggtatagagagactctttggaggtctcgacggcctgacgcactttccagtaggtattccgtccttgacgtgaagttcggtgaggaagcaaacggcttccatagaacctgtttcattcaaggcgtgaatagttttctggataacctgcttgtattgacgttcgtcgagttcgcgttctttgccgcagcctaccagcagaatgcgctcggacagaatgtttggaacatggtgcaggaacaacgtctgccccacttttccttccagttcaccgcggcggagcagggcgctgatgtacccattgctgattttgtcgagctgttcagccataggagataggcggcgtggttcgaaaacgccgactacaatacaggcactgcgctgtttttccgggctaccgctttttacactgaactccatgcactctcctgaatcttaaagacaaaggcgggggtacggatagaatggggcttccgttacactctcccgtcattgatgtaatgacctgtgttaacctatacggcgtagaaattttattttggcggctataagcatcttcctataggtcacctaaatttacggtgttgtaatactattttagctgtgaaggttgccatatgatgagaaaaaatgacggattagcgatgaaattatcgattttcctgcaaaaagacaagttttcacaggcgtattcagcgtgatcatcattagatatctggttagggaaaccttcaagagccaaattgcgatcctgtttattctgcttctaatcttcttttgtcagaagctggtcagaatactgggtgcagcagtcgatggcgatatcccaacaaatttagtcattcagcttcttgggttaggtatacccgagatggcacagcttatcctgccgctgagtcttttcttgggtctgctcatgactctgggcaagctctatactgacagtgaaatcactgttatgcacgcctgcggactgggtaaaaggtcactaatcgttgctgccatggttctggcggtgttcacctctattttcgccggtattaactcattttgggtcggcccctggtcgtcgaagcatcaggatgaagtgatggccgaagccaaggcgaacccgagcatggcggcgatggtcgctgggcagttcaccccttcacaggacggcagttccgtgctgtttgtgggcaacgtgcgcggtaaagaattccgcaacgttttcctggcgcagcttaggccgaacggcaaccagcgtccgtcggtggtggtggccgagaaaggccatatggaccagcgtcctgacggctcccagcaagtgacgctggacaccggcactcgctacgaaggtaccgcactgctgcgtgacttccgtatcactaatttcaccgactatctggcggttatcggccacaagattgtcgagctagacagcagcgacgtcgaacagatgagcatgtcttctctgtggcattcaaaggctatcgaggcgcgcgccgagctgcactggcgtctgacgctggtggtttcggtgtttgtgatggcgctgatggtagtaccgctctcggtggttaacccgcgtcagggccgcgtactgagcatgctgccagcaatcttcctctacctcatcttcttcctgctgcaaagttcgcttcgttccaacgcagagaaaggcaaactcgatccgatggtctggatgtgggcgaccaaccttgcgtatctggcactcgccgtggtgcttaatatgtgggataccctgccagcccgcaggatacgcgcacgttttagaggagcggcctgatgtttggtgttttagaccgttatatcggacggaccattttcaacaccatcatgatgacgctgttcatgctggtttccctttccgggattatcaaattcgttgaccagctgcgtaaggtcggacagggcagttattcggcgctcgatgccgggctctataccttgctgagcgtgccgaaggatatcgaagtcttcttcccgatggccgctctgttgggtgcgctgttgggccttggcgcgctggcgacacgcagcgagctggtggtgatgcaggcctccggttttacccgtatgcaggtcgcgacctcggtcatgaaaaccgctatcccgctggtcttgctgaccatggcaatcggggagtgggtatcgcctgccggtgagcagatggcgcgcaactaccgtgcgcagcagatgttcggcggctcgctggtctctacgcaaaacggcatttgggcgaaagacgggcacgacttcatcttcatcgaacacgtggtgggcgacaaccagatcaacggcgtgaacatctaccacttcgacggtaataacaagctgctgtccgtacgctatgctacctctgccgagtacgagaacggtggctggcagctgtctcaggttgacgaatcggtactcgacagcccaaccaagatcagcggttctcagaccctgagcggtgaatggaagactaacctgacgcctgacaagctgggcgtggtcgccttggatccggactcgctgtcgataagcggtctctacaactacgttaagtacctcaagcagagcggccaggaagcgaaacgttaccagttgaacatgtggcgtaaaatcttcgcgccgctgtccgttgcggtaatgatgctgatggcactgtcatttatcttcggaccgctgcgcagcgtgccgatgggcgtgagagtcgtgaccggtatctgcttcgggttcctgttctacgtgctggaccagatttttggcccgctcagcctggtctacaacataccgccactactcggcgcggtattgccaagcgcactgttccttgtcatcagcgtctatctgttgttgaaacggagttagccaagaccccgagggataaaaaaagcagctcaatcgagctgcttttttgctttctgaagcctgagagtgaggagcttagatctcgttgttacgcaccagatcggccaccagatcgttcacgccgtcgctcatgttcttgaacttggtcagctctgaccgggtgacaacgataaatacccctacgccgcgctgaggcaccatcgccatataggtaatgaagcccccaccgccgccggttttttgaatgatgcgcggcagcaatggcgttggcgccatggtaatccagcccatgcctaactcataggcctgccccggaacgtccatgcctttcaacgacaccaggtcggtacgacggaaatacatcttctgcgccagcgctgcggtcggcgattgctggccagcggcgttaggcaggaactgcttcatccagcgacccatgtccgccggtgtggaatagactccgccgctgccctgtgcagcaatcgtgttcagacaagggcttgggcgcaggccttccatcagacgagagcactgtgccgcagtcggcgtgaaggtggtatcgaccatgccgtttggctgggttattaactgacggaacagctgcggataaggctgatgcgcggcgtcggccagcgcgtccgacagcaggtcaaagcccagattggaataggaggcgtgcgagccaggcgggacggtaagcttggcggtttgcaaccagctccagcgttccgcgcgattcggccaggtaaacaccggacgatgcggcgcgccgcccggctgttcgcgtggcagaccggcagtgtgggtggcgaggttgagcaaagtcatcggcgacgtcgggctgtaatacggaacgaaggcgttgcccggcgcgtacttacgcagcggatcggtcaccttgaccgtaccctgttcagcaagcttcaccagcacttcgctggtcattagcttggtcagcgacgcgatgcggatcagtgagtcttcacgaggacgctgacccgatcctgcccgggtttccccaaagcttctgaaaacctgctgattcttatcgacaaccacgagcgccatgcccatggcgccgctgctatagaaaatatgttctgcgtgttcatcaacgacctgagaggccagtttttgggtctgagcctggctcagtacaggcatactggcaaaagcaatggccagcagcgacagggagaattttttcaacaaacgcgtatccattctaaaagcggtgagagggaagattggatttatcttaatgggatacgcgaagaaccgcatgaggaaatcgatgcttccgcaaaaaatttacagagcaggggaggcagaggcatcagggccgatggcctgaaaatggtgtaaagaaattcctaataaaatttgtgctgattatttactcacacagggcaattacgctgctttattattctatttataacgacacgaaaattaaataataaccttacggacaatacacagtgtggattatttaatttacgaagcttctaaagctaactttgtaattaattatgtcatttttgaacttattaatttgaccgttttgattatttattatccttaacgggcttttttagagttttcaataattcttattttcctttggttacatccttaaactaaattgtccgatttttaaccacaaaaaagcggttaatgtgtgaccgtcgtcgcatttaatgcttttccgcctaccacagctatgttaaatatttatgcgtggtgcaacgccatatttcttaaataacaaaaataaaattgttggagacagggtaaatgcgtaatttaaaagcgccaatcatcgttggcggagttattttatcggtactttcagccagcgctcaggctgaaatcaccgttttagataaaaataagcaaagtgattccttactggccccgttgagcttgcaggttggcggcagtattcgtcctgaatggattttccagaacaccaagaataaaacgcacggtgattcaagtggtcacgacggcggcacccgtttccgttttagcggcgactatgccctgacagatcatacttctattattggtaagtatgagcttggcgtgaacatgtatcacctgttgaacatcaagtcaggttatgacgaaagcagcaacctgctgaaaaaacgtcaactgtattacggattcaaggatgaccgttacggtaccctgacttacggtaagcagtatggtccttactatgacatcgtcggtagcaagagtgacgtatgggataacgatggtcaggcagcgggcgaaggcgtgggtctgtccggcgacttcgacggcggtaaccgtccatacaacagcatcaaatacgtaaacaccatcggtgcatttactattgatgccaactacctgttgccagaaactgaatacgatgcgggttcagactctgtgggtgatgatttgcactatcgtcgtgacggcggcggcggtctgggtatcgattatgcggtaaccaaaacgctgacgtggagcggtgtttacaccctcaccaacgcgcgtatgaaaaacgacaacaatgattccaagcagtatcaccagcagaccactgcgactgctttgacctggcagccgggcgcatggtacttggtggcaaccgccaactactataaagactacgtgccaagtcatcaggacaacgtgaaccagaataactacttcgcgggcgacggctacggtctggaagccttcgcgggttataccttcacgtttaataaagagctgctgaaatcggtacagccttacgttgcagctgaccagctgaaactgaaaggcaacgaagactacgatgcacaccacgtgtatctgggtacggcgttcgacttcggtcaccacctgtcactgtacgtagaacgtaccctggcacgtgctcctggccagtctgactctactgctgtcagcttctactacaacttctaatcaccgacttttcttgcaaaaagtcgtgataaagaacagggccggtgccgcaatgcaccggcttttttatggccgaaaagtacgatgccgccagtatttttgccgcaatatcaatcacaatgtgcgttttagccgcttttttcagcacttggtgcaagattaaggggataagtattgcgcgggcatacggtagaggtataatgcacccgttttccgcatactactttcagtgccgaagtggcgaaatcggtagacgcagttgattcaaaatcaaccgccgcaaggcgtgccggttcgattccggccttcggcaccattagtatgtaaatagacctcaattgaggtctttttttatgcctaaaatccagtccccgcaaggctcctctcgctttttcagtcaacataagtcaacctgattcaatctacatcaacttactgatgcgggtacaaatgcgggtatatcccggttcgataatgtttgtacccacacagaacccttgaaaggatactcaacatggctttgagtgatgtgaaggttcgtacagccaagcctgaagcaaaagcctataagctaaccgatggcgacggcatggtgttgttggttcacccgaacggttctaaatattggcggctgcgttatcgcttcggcggtaaagaaaagatgctggcattggggaaataccctgaagtgtcactggctgatgccagaggtcgtcgtgatgaagcacgtaagctgttagctaacggcgttgaccctagtgagaacaagaaagccgttaaggtcgaggaggagaaagaagcgataacttttgaaatggtagccagagactggcatgccagcaatcagaagtggtctgcatcgcatagtgctcgtgtagtgaaaagcctggaggataatctctttgctgccattggtaagcggaacattgcagaactgaaaacgcgagacctacttgtacccatcaaagcagtcgagtcatccgggcgacttgaagtcgccgcccgtttacagcagcgtactaccgcgattatgcgctttgccgttcagagcggcttaatcgattacaaccctgcgcaagagattgccggtgcggttgcaacggcgaaaagacagcatcgtgctgcattagaacttaaccgcattcctgaattacttcaccggatcgatcactactctggcagaccgttaacccgactggctgtcgaactcacgttgctagttttcatccgttcaagcgaactgcgttttgcccgctggtcagaagtggattttgatactgccatgtggacgattccaggtgagcgtgaaccactggaaggcgttaaacattctcagcgtggttcaaagatgcggactccccatcttgttcctttgtcgcggcaggctctggctattttggaaaagatcaaaagcatgagtgggaatcgagaactgatttttgtaggcgatcacgatccacgtaagccgatgagtgagaacacggtgaataaggctctacgagtgatgagttatgacacgaaaacggaagtatgtggacatggtttcaggacgatggcttgtagttcgttgattgagtcgggtttgtggtcgaaggatgcggtagagaggcagatgagtcaccaagagcgtaactctgtgcgtgcagcttatattcataaggccgagcacttgggtgaacgcaggctaatgctgcaatggtgggcggattatctagatgctaatcgggagaaggggttagtccgtttgattttgggaaattaaaatctccagtgaattaacggctgacttgaagggaatttgtgcagcaggattaaatggtcttatcaaagcctgtcaccggaaggtggtaggctgacgacttaatttttttatttttgatataaccgggataacgtattggaactacttgataaaattttcttcgggtagaataagagtatcatcctctgcgggtactgtagctttcaaggaacaataatggctgttaatcaggctaagatttttgaacatctcgagcaaatcgtagtatctccagatcgaaacgagtttatctacggctttttgaccgcttttgagtttcctaaagctaccttgagtctcatccggcaaggcggggcgcggaatgttgcgaaagagcctggacatgttgggttaaaaaataagctctattaccagccagtagccgatagcgatgatatcgaatcagtttttgagcaacgtattgccgattcggctgttgtaaaaaataagatccgctttgttctagtaacaaattttgttcgctttttagcctgggacacactgacgaaggagcgtctcgatattgagttagaagagttaccacgcaactatggttttttcttaccgctggtcgggctggagaaggctattctcaatagtgaaaatccggctgatgtgaaagccgctgaaaaaatgggaaagctgtttgatcttatcaaagagcgtaatgatttaagcaaagcagaagatatccacgcgcttaatgttttcctcactcgtttgttgttttgcttttttgccgaagatactggcatctttgaaaaaggtcagtttacttccgtagttaagagttacaccgctgaggatggcagcgatttagatcagttcctaacggacctctttactgtgatgaatagcaaacttgatagtccatcacgacaatcacttcccattcatttcactgcgttcccttatgttaatggcggcttattcgctagcgatgagccaatccctgaattaggtctgaaaggtcgccgcctcttacttgaatgtagtgcaatggactggagtgcgattaatcctgatatttttggcagtatgttccaggctgtgattgatgttgagcagcgtagtcgtttaggccagcactacacctcctacagcaacataatgaaggttatacaacctctgttccttgaaccactgcgtagcgagttggaaaagcagcgcacaaatactaatggtcttaaacgattactcgttcgtctgggcgaaattaaggttttcgatccagcatgtggttcaggtaatttcctgattgttgcctataaagaactgcgtctattggaaatggatgttattcgggctctattgcagagtgatccgcaatcgttccttatgagcaggattcatctcgaccagttctatggtattgagatcgatgactttgcctgtgagatagcccgtctttccctatggcttgcggagcatcaactaaataaacagtgggaagaacatattggttcagcaccaccagcgttgccgttgcgatcgtcaggtaaaatttggagtggtaacagcctgcaaaaagactggcaggcagtatgtccgaaagagcctgatgatgaagtttatgtgattggcaacccgccgtttttagggacattaggccgctctgatgaacagcgtgctgatatgcagtcggtatttagcggttttaagtcattaggtggtttggattttgttgcctgttggttctggaagggagcgcaatatatccagaatagccgtgctgagctggcactggtagctacaaattcgttatgtcagggagagcaagtagcaacactatggcctgctgtattcaagctgggtctgtgcattcattttgcttacccaacctttgcatgggcaaataatgctcgtgataaagcagcggtgcatgtggttattgttggtctatcaggacgaagcaaaacgcgtcaactctaccagcaggtagacgggcattggcacagtaagctggtgaacaacattagcccttatctgattgaaggcagcaacatagccgtgtcggcgaaaacaaaaccgatggtaaagaatgtcccccagctattgtttggaaataaacctaccgatggtggtcatttgctaatggatcgtcgtgaacgtgatatgttgctaaaactggagcctcaagctgccccttggattaaaagagttatgggagcggatgaatttctcaatggtaaagagcgctggtgtttatggttggcagatattaccaataaagagcttcagtcgatgccgctcgtcttaaagcgagtacaaaaagtagcagaagcacggcgtaaaagcccagacaaaggcgctcagaaaatggctgagcgccctcatcaatttagagatttaaataacccaaatgattatattctgatacctagtgtttcatcagagcgacgaaactatgttcctattggcttttatgatgccagtgtaatttcaactaatctgaattacattctcccgaatggcactttgtacgagtttgctatcctgacctcaataatgcacaacgactggatgcggctggtagcaggtcgtcttgaaagtcgctatcgctattcagcaacagtcgtttataactctttcccttggcctggcgtgactgatgaacagcgtaattcgcttattgcattggcaaaaacagtattactgacgcgggaaaattacccagaaaatactctagctgagttgtatgatccgttaaagatgcccgcagaccttttggaagcccatcagactttggataaggctgtagatcgtctctaccgtgacaaaccattcagggacgccactgagcgtttgagctgcctgttagaacgctacgaagcgctgactaaagcataaggttttgctctgccagccagagcctacagaggattgcattgtggaaaatattttacaggttacgtacgggcagaccgggcaaagtgcgcgtcttaatgattttggtatgcgggaaatgcaggctcgagcttttgaacagcggaacaacccttatctgcttatcaaagccccaccagcgtcgggtaaatcaagagcattgatgttccttgctctggataagcttgttaatcagggtttacgcaaagctattgtcgcggtccctgaaatgtccatcggtggttcgtttaaagatactactctcacggagcatggtttctttgctgattggaaggtaaaacctgaaaataatctgtgcattggcggtggagaggctgggaaggttgaagcctttaaacgatttatggcgagccctgacgacattctggtttgtactcatgccaccctgcgttttgctttcgataagctgaatattgaatcgtttaatgactgcttggttgctattgatgagttccatcatgtctctgcggatgaaaacaaccgtctgggcaatctgattgatgctctgatgaaaggttctaatgcacatattgttgcaatgacaggttcttacttccgagggataccgtacccatcctgcaacccgaagatgaagcccagttcacgaaagtgacctatacctactacgaacagctcaatggataccagtatttaaaatctttaggcattggctaccatttttatcaggggccatacatcaaggcactaccttcagtgctggatgccagcaagaaaaccatcattcatattcccaatgttaattccggcgaatcaacaaaagataaacatgctgaggttgatgccatcctggatgcgctaggtgaggtgcaacagcaagagccagataccggtatctatcgagtgaaacgcaaaagcgatggcaaattgttgcgcgtagcgaatctggttgatgataacccggcggaaagaccgaaagtacaggcgtatctgcgtaatatccactctgctgacgatatggatattattattgcgttaggtatggcgaaagaggggtttgactggcctttctgtgaacatgtgctgactattggttatcgcagctcgatgacggagattgtgcaaataattgggcgtgcgacacgggattgtgaaggtaaaactcacgcacagtttaccaaccttattgctcagcctgatgctcaagatgatgacgttaaagtatcggtaaacaacatgcttaaagccatcaccacctcgctgttgatggagcagatcatggctccaaatattcaatttaaaccacgatctcaatggactggcgagccgttacctgccaatacagttctggttgatgatcatgcattaccggtatcagacaaggtcctaacaatccttaacggcggtaaaaacgagatcctggcggcgctaatggcgaatgagcaggtggttaaagaggctattaccgaatcaataccgcctgaggtgatcactcaggtagtgttaccatcagtgatacaaacgcttcaccctgacctgactgaatacgaactagaacaggtacgcagtggtattttgcagagtctttttgtaggtcaatgtggtggtcttattgatgaagccgatttaccgacggatgctattatcgataacaccccaggtcagcgtaccggcaattcgaacgactcattaaacatcaacaatcagttcataaaaatgggtgataaattcatcaatattgagaatctgaatatcgacctgattgatgtggtgaatccttttcacggtgcttacgagattttatcaaaatctgtcaccgcgacgatgctaaaaactattcaggaagcagtcagagcgaatcaggcgcaggtatctgaggaagaagctgtgatgctctggcccagaattaaagcatttgccagtgaacatcaacgggaaccatcactgaatgccagtgacgcaatagaggttcgttacgctgaagcactggcctatattcggaaaatgaaacaacagcgtgctgtgcgacaggaacggtaactcatgctcagactttctcctgttcaacctcgtcataaagtgaccattgacgatattttttctgaagctgatgatctgggtttactggtggttgaaccactgaaaatgtattcacctacgggtaatctttcggtcagtcggttagaagagattaattcgttttatgctgttcacggtcatcctcctcgagccgaatcggatgagtttaaagaaacgttgcttgctcaacgtttgcgagcactcagagataacaaacaatgccatgacgtgttgcagccgtttgatatccacggcttgcttgcggatgaaagcaccgggaatccctatgaaccatcggtatcattgttaactccccctgtcgtggttgataaatctgagttggtcacttcgctggaggatatctttgctgatgacgacgatggattgctctcatttgctgagccggatattttcacgttaaaacatgtacctattgaaaagaaaacacagcctgacgaaattgccaaacggcagccttgcccggattttcatcgattttccccactgtttgagacagtccaaaatggtctgaaaacaggagcgttttcatttgttcgcttccgtcatgagttaaaaatttatgaaggtgatttttttattctcaatggggttatgggctatgtcgataaagttggcgagaggttagaggaatatggtccctggaatgcccgtctgcatctggtgttcgaaaacgggactgagatgaatatgcttttcctctcacttacgcatggtttggtacgagacacagaaggtcgcaaaattattctgaacggccaaaatgtgcggccagatgagacaccggttccaacaggatatgtctatgtccttgccacgcatagcaaccagcccgctcttcaacgtttcaaacctgatttatataaaattggctttaccgaaggaaccatcgaagagcgcattaaaaatgctgaaaaagataaaacttttctcgaggcccccgttcggatagtcatgaccacacaatgcttcaatattaacacccacaaactggaagcgcttattcatggttttttagggaagcaacggctcaatatcacgctgagaggtttggatggacagacctaccatcctcgcgaatggttccatgcacctttagcgactgtgctgtcggtaatcaagtacatccttgatggtactatctcgcagtaccggatggataatacgacaggaaagatagtagctaagagagattctgattattcgtgaggcttgaattcgctactggctgaatagacacttccaagtcgttgatagggcgggaccgtctaccggggaaaggtcagtccattaagatacaaaagccgtcaggtgatggtgggtaaaaatcaataaccttgaggaaacaattttgctaacggataaattgtctcagctggatcggcctaccaggaatgaaatgagtctgtaagctagggagatgggctctttttttggggtattattaccgacgataaccggcgtaatgctacctttagtaattcgttccagacgttgaatcatgcaggtgtgcttgaacgttacctctgcgccatgttgcgaatcgagcagtaataattcgttgcggtccgtgcatgaggcgagttggtacgggttttcttttcctcttcgttactgaataggtttgactgcagcccatagggctgctgttcacacattttcagaaatcatatacattcacgataaggcccgattatcgggcctgcagttttgccgccgctttgtccaacttctgctgagtcggtgcatgataaagatcaacgcagtaatgcctgacgtaaaagtctgcgccagtcccaccattgagcttatggtcggtatcaaagcgtaggccgtcagaacgtctgccatggcagtgaattcctttgtcgccaagctttgtatgccattcgtccatggcgaacttggcaccacttgagagcttcgaatagaaaataagccccctctgcaattgttcacgccacctttggcatagctgccaattaactgagtatcaagtccctgatagacatattcgaatccgttccacagcttcgcttccgcgacccactgataaagctcaccgtgggcacttctgacttcaaagtaatagtcgcagtgaccaccgttctgcgcgtcatgatgtgtagacggatacagctgcttgagctgtgaaagaatgtgatcggtgagggcgtcttcccctttatccatgtggtgctgcctgccggattcagtaatggtgatgacgttatttaaatctttatcgatctgtgcaacaaaatcgtcgtacgtcagcgggctgtgtctgaccagctgctccattagctgcggcgcaacggcaaaaatatgctgcatactgtagcctgcagccaaagccatatcctcaagtggcccctgagacatcaatccatcctcccacttgcagcagattcaggatcgggttcggccttgaacatatttacaaaataaggaaacgtcctgccgtgcaggtcgctgagcgagatttggttaccctcagaatcaataaattcgtcctgggaaacggcaaccatataatcagggtgttccatttcctgaattacttcagacaggttttcgtcataaattctgtaacgaacctgcagcgcctgaaacgggtgcagagacagtgtgaaggctgcgcggatgagtaaatcatcaccgtctgtagtgcgctggagggcagccctaagcccgccaattgtaagattgatctgtctgggatgtcgttcgatataaaccgtaatctgctgacagaccgcgtacagcgatgaagtatccgacttcgccagttcgctcaacaattttttgacctgggcaacattattcatgtttcagctggcttttggctgtggttggggaatgtgagataacaccttatcaatcgcgaagcggaaatcttcaagcctttttacgtcactcactgagaaatcggatagaggctgggctgtatccagcattttaggctgccccatcaggccgacctcaacgtcaacggtactaatggatccgtcaactttaaacttccattttttcgctaccataaatttggcgtgaacaaatccgccgctttctccggcccgatgatagtgatcttttttcaggcattcctctttactctttaggggaatgcgcactgggttaccattggtagttacgtgccccagtttggtaataaatccatccggtgcgttgtatagcggttcgatagcgctgaatacgttcgtggcctgcccgcagtctattccattttgcataagaaacgtcctaagcatgaaaagttgatcctgactagccataatagacaaagaatttttgtccacagataagatcagcttggacgtttccggttgccagtagatcacgtggaaaagctgcgttctcaccgtccgtttcatcatgtagaccgtgtctgcgctctgaagttttctaccttcattagacaaatgatctacaggaactggttcctcaatgtctttatcaacaactgtacaagcgactaggcgacgaaagcgtgcgttaccaatgtcaacctcatcagaaagagcggggtaaagcttgcctctttttaagaggcccagtagcctaacgtcttcaaccggaaacgggaacgcatcgctgatgaccttctctggtgagatccggaatgtattcaggaatgaggttaaattctgcttcatcatctcatcgcggatgaagaacacctcaacttggcgggtatcaagctgaagggccagcagtcccagtgtattgattttttcctgcagcttctgatttcctgagactgcagagaggatgtcctgcttgaacacctcttttgaacgggacttcagcgacagcacttcatttatctgactctttgcgaagttaaaactgtacctttctaaaagtgtgtcaattctgtgttgataagatgtagacatacaagtccttgctttgaatcgccacaggtttaacagacacctcagagtcatttaagatggcttaaagagaggtacctatgagcgctaagcgttatcccgaagagtttaaaattgaagcagtgaaacaggttgttgatcgtggtcattctgtttccagcgtggcaacacgtctcgacatcaccacccacagcctttaagcctggataaagaagtacggtcccgattcttccactcataaagaacagtcagatgctcaggccgagatccgccgtctccagaaagagctgaagcgggttaccgacgaacgggacatattaaaaaaagccgcggcgtacttcgcaaagctgtccgactgaggtacgcctttatccgcgacaacaaccatttctggcctgttcgcctgctctgtcgggtgctggatgtgcatccgagtggattttacgcctggcttcagcaaccggattcacggcggcatcatgttgatctgaaactgacggggcagataaagcagttctggctggagtcgggttgtgtttatggttatcgcaagatccacctcgacctgcgggataccggacaacagtgcggagttaaccgtgtctggcgactgatgaaacgtgccgggataagggctcaggttggataccgtagcccaagggcacgcaagggagaagccagtatcgtgacgcccaacaggctccagcggcagttcaacccggaggcaccggatgaacgttgggtgacggacataacctatatcaggacccacgaaggctggctgtatctggctgtggttgtcgacctgttctcgcgtaaggttatcggctggtcaatgcagccccggatgacaaaagatattgtcctgaacgcacttctgatggccgtgtggcgacgcaatcctcataaacaggtgctggttcattcggatcagggcagtcagtacaccagccatgagtggcagtcgttcctgaaatcacatggcctggagggtagcatgagtcgtcgcggtaactgtcacgataatgcggttgcagaaagctttttccagttgctgaaacgtgagcggataaagaaaaagatctacggaacgcgggaagaagcccgcagcgatatttttgattacatcgaaatgttttataacagtaaacgacggtatgattcgagcgatcagatgccaccaactgaatacgaaaaccagtattaccaacggctctgaagtgtctagattatccgtggcgattcattgtcctatggcttagaattatatcgtcataccgataaccactaccggaaagataacggtaacaatcgcaaactctgtggagggaagttggctgaggcgataactgcaagctcaaaccagtgcacataatctaggtcgccggtcctgacctgaaggtgacctgtcgggacgagtaaatagatgtccaacaatgatcagggtaaccattatacaaatggggagtttcgttggtaattaatccatgaattattcgtataagaataagccatgcatactgaacgcatggctaaatgaatgttaagaatttgaacgcttcggagaccttgtaaactgtaccaaagtgccactgtggctgtccgtttgctcttcacgtcgctcggccaacatggatttcaatctagtcaaatgaactacagcagctttcttacctgtcagatacccctcaggtaaaccgaccatcatttcgacatcaatagaggataatcccgcaaaagcagccagcccctcaacagaaataatgccagaagaagccagcaattctattgtacgttttaacaggcgtggtttttcaggatcacggtaatcatccccaggctctgacttaacccccaccgcgcggaacggcgcttatagaggttttgcttttcttcttctgtaataatactcagtgcgtgtaagcgcattatgctcgctgcaacagaaataccgtacctctgtttagttaaaagcaaactatctaatgtgactggagttctaacttcctcggcaaatgtttcggcaggcagtagtaacgctcctgcaaatttatgagcctgactttcctttaatttataacgttcagcctcaagttcattgccaacataccggtgaagaatcaggtgcccaatctcatgcgcgaggtcgaatctgctacgaaaagcattgcctttatccgaggagagcagaacaaaaggaactcctaaagtctcactccaagcggataggccttcaatttgtgcaacccccgtttcctctctcacaactataataccgttgctctctgcagctaatgcaagatcgggtatttcctttgtgccaagattccacaaagctcgacattcattggctgcatcttcaatatccgcatcacttatctcatcaatatttgtaaaatggcggtgcggtaattttaactccggcagatcaacaaactctgtaagcctagtaacgagttcattagcccagtgaattcgagtttccaacattgctcgagctgctacatgggcggaagcgttacttctgaacaagggttttgacatacccggcagcaggggcgggtaaaccattcaggcgtgacatttacaactgaagccaagcgttctaaagcctctgactctggagcctgctgcccagaacgccatttgctgatagttgctggcgatacgccaaccattgtagctagctgagtttgggatagccgccgggcggctagtatttgcactaacctatccggttgaaattcagcaattcctcggctcatacatcattatcctcggtgccgtcttgcttgataacgccctttttcagtccagggaatgcgttatcttcttgagacggaacaacatcatatcgggttagaaaaagttcaagcggttcgtggaaaacccagctcttcccatcacaacttggaacaaccagctctatagacataggtgtttctggctgggactgcaaagaaccagaaaaacgacatactatgaacagtgtagctttcggtacatcagaaccatcggagaataaatccggttgcactactttttccacaaatacgttctcagagataagcgtttgcttacgtttgctacgaaaaagcttcttccactgattatcattgtagctttcacgagcaattgtgaagataccgctatggccttctacgatacggttgccagacaatttaccagggttacaaccgttcgcttcgaaaacttcatggatggtttcattcaaattgagataacgctcaaggccaagtgcagttgccctatgaccttggcttttctttttcgcagaatcatatgaacgctttgacgccgcatagatcgcgtcggaaagggccatgagaagttgtttttgtacatgctggacgatcagatctgccactttggattttttcacaaccgtttcctatcactgtcactgataggcgattttacacctttattttttcgtgtgtctatgttttttcttttataaatttcctttggggtgggttttatcatattttggttatggtttttgggccccgatggctgcttgaactaccattgagtgctttgggagtgatgcgtttagatgtgatagaaaaccaaagcaatgtaacgctaatggaaacgccactgctatctagaatatattgcatcattgatgttagcagcgatgagacatgaaatttatgtacacaatttttttagacggaaaaaacagaggttcccgtgccacagggttgggataccacgaattcgttgaagcatttgagagcatctgtcgggaacatagcagagacaagcgcgctcgggcctttgcatttattttttatgacatgactaatggccctgtcagacaagccctaaaaagtgcccgcggctttgaaatactcaacatggaaacaggtaaggatatgactcttttttatctgcatgctgtagctgatgagtcgtatataaacacttttaaccagtattttatgcaattgctaaatgttgaaacccaaatcactccgccatgcattgtttttttccgtgtgaccgaagatgaaataggcgatattagcttcagatacattgatgatcaaacagaagaagaacacttgattgttgaagctttgcgtcgcgacattgcagaatatacaaccggcataaatgcggagggcgatctttcaccactgacgaaagctgtaggttggttatcaaaaacagcctttactctgggcctgaaacatattttttgatcagatagttgcgatgattaactatgttccttctattttcctgtggggttctctaccctaaacactgaaatcgggggctgtgtgtattattaatgagctagagttaatttgtatttataaacaacttgttactctaaattcatgatcaatgcagggtataagtatcaggagtcgaatgctcttcttgggactcagcaggagatcaactccagtaagtaacttaccgaataaatttcataacaaatttcagtaaaaatccaatttcaaaataatttcaaaacacgccctgaatctgcttgaccaccatctgcgtgagccaggggggcattcacctccacacaggcggctcgcgactggctcatgctcaagatgggaactcttgagcgagaagaatttatcgtgatgtatctcaataacctgaatcagctgcttgcccacgaaacgctgttcaccggcaccctcagtcacactgaagttcatccccgcgaggtagtgaaacgcgccctgtactttaacgcggctgcagtgatatttgcccataaccacccatccggggaggtatcgccgagccaggcagacaaagctattacccagcgactggtacaggcgctgatgctggtggaaattcgcgtgcccgaccacctgattgtcggtggcaggcagatattctccttcgccgaacatggccttctttaacaggaataaaataatgaataaagacgctacccagacctggggtcttaaacgagatatcacaccgtgcttcggagcccggctggtgcaggatggtcatcgtctgaattttctggcagaccgggcaggatttactggttcgttcagcgagatgcaggcccgacaactggatgaagccttcccgcattttgtcgcgcatatggaactgatgctgctctccggtgagctgaatccccggtgcgcgcactgcgtcacactgtaccgtaacgagctgacctgtgaagccgataccctgggcagtcatgggtatgtgtatatcgccatttatccctcaaataagcttaaagactaatcttctgcatcatctcagggttgtaagccttcaattcttttcttcctttattaagtgactcaacacatgcaaatcttatctgtaccggccacggtgccggttgcgtcacgtctgtcgcccgtacaggtctggcagcaattgttaacgtatctactggagcaccattacggcctgacgctcaacgacacaccattccatgatgatgcgaccattgaggagcatatcgacgcgggaataacgcttgccgatgctgttaatttcctggtggaacgctatgaactggtgcgaactgatcgtaagggtttcacctggcaggagcagacgccattcctgactgtcaccgatattctcagagcaaagcgtgctaccgggctgatgaatacgtaaattcttcgagcctcattcctgatttttacctctgaacttcccaccttttgtattcatcgcataatgcgcctgccactcccggcaggcgtgtttgctcttatggacgattaacgatgcaaacagaacccgacgtgttaacggaacacaatgaactcattctttcgaccaatatcgaacgtgtagtgactggtcgcgattccgcacttaaacaaattgaacaactcattcagcagcttgatgccatttcacggctaacctcagaaatcggtggtggtacagcgcaagactgggcgatgaagtccgggcacctctacgatagctggctgactgagaaggctgataaagcgatgcctgccgtcacccgcaatatagatcgcagcatctggcgcgatttgatgctgaagtccggcatgatggcattgatggacgcacaggctcgcgaccagtggcataagaacctcgaggatggcgaccttcctgcaatcagcgaggcgaatatcctcagcacctttgagcagttacatctgaacaaaatggatgtcttcgaacgtggcatcatcaacgtgttcaaaggtctgtcgtgggattataaaaccaatagtccctgtagctttggtaaaaagatcatcatcaataatctggtaagtcacaatcgctggggatttagtctgaactggggttggcgacgggatcaactggcggacttagagcgaatgctgtttctgctggatggcaaactcatccctgacaaccggggtgatatctccacccggttgatggagcatatccgggataatccggctaaggacgtttacgaagatgagttcttcagcattcgttactatcaaaaaggcacggcgcacttgaccttcaagcgtctggagttgattgagcgaatgaatgacatcattgcgaaacactatccgggaatgctggcttcgagatgatgagaggactgatgttgtcttcgccgctagtagttacgcgaacacaaacgtgctattttaataagtgttattaacttttattaaaaggtgacgatcatgagacaactcgcaaaacagacgatcagcgcccagatccctgcagagcttgcagctgcggttgaaaacttggctattgaactggatagatccaaaagctgggtgattaaagaagcgctgaccgccatgattgaagagagagagcggcggcatcagcagattttgaaagggcttgctgatgtcgatgcgggaagggtggttagccatgcggatgtagttgacttcgctaacaaactgaaaaaatcataacccatggaaatacagtggacccaaaaggcccaagatgatctggagcgtatttataggtttgcctgccagtacagtcggcaacatgctgacaacgtattagaacgtttgatcatcggaacctcagggctcgccgaccatccaagaatcggtgtacctcagacaagatatgaaccacgagaagtgaggaaaatcttgtttgatgattatgacgtccactatgaaattcagcgcgatactatttatattgttgacctgtggcatacccgagaggatcgctgaagttcgtcatcttctaggtaacctttgccccgattcgagtcccaaaatcaacgatttaatgtgttggtatcgatgttggtacattatctaaatgttattttttatttcttttaaatcaaaggattaatcttcatgtgcgagtccggccttcgcaccaaatagtagtatgaaaaattaagtcaccctccgggtggctttttttttgcctgaaattcagcctttgtaaggcttctgtcgcttttttgacctgtctccccagtaatagatacaaccctcagtgagtcatgtcggttggttttttcttcatatttcccgtttcgccagctagctgaaaattcagacggcgtgtggtaattcagcggtgaatgagggggcactcgttataatcctgatgccatacactgatggttttcctggcatggctgacgtcgctgaacctgtgttcattcaggcattcatcgcgaaagcggccgttaaaactctcaataaatccgctctgcgtcggcttgccgggctagataagccgcagctccaggctatgctcataagcccactggtcaagtgctctgcaggtaaactcaggcccctgatcggttcttatcgtcgccggatagccgcgaaacagcacaatgctgtccagaatatgcgtgacctgcacgcctgaaatcccgaaagcggcggtaatcgtcatgcacttcttcgtgaaatcatctgcgcaggtcagatacttgagcctacgaccggatgccaatgcgtccatgacgaaatccatcgaccaggtcagtaaaacgtggcatcagaaatggcgtatttgcggaatagttcacgggcggataccccggcttgcgcttcgcggagaatactgatgatcttttggtccgaaaaacgcttcttcatggtgatgtcctcatgtggcttataaaacattacttgcatcgaggtatactaatcaacgtagaacaggccaccttactttctcaatcttataagtacaggaagaggataatgaaatttttaattatttcgatgactcctttccagcactagctttatgttatttatttttgatttagttaagcttgttttccaaatatatactccaaatagtatgcaggatgaaagagtaatcaataatgataagagaatatgaggctttatttcttgagagaaaatataatatataattatgaaagtgctctgaaatattaccatcatagaaagcaatcgagtaaataaccaatcaaataaccaaaatgtccatcctgtatctagaataaccctcccttctttgctgtgtatatattggtttgatttttcgaaatactttatgggaagatcttgcttttttataatgttaaataacggaagtaccttgttggcatcccttatgcctgttaattttctcaatactagcttccgttgttcttgctttaacttctttttatcatcaggatgtaatgaaggcaatttcaatagttcatcaagatcgcttattttctttttggttaaatcctcaatgatatttaacgtttctttcggcgagctaataatagtttttaaaaaataatgaattattattaatgctaaaatgcccatgtttaatttatcttctattactaaattaataaactccatttctactattatccttataaaaatgctttgttaaaattatactccgaaactctgcttctgttagctattgagctgaaagtcatatcagatcttacgtaattcatcatacccaattatcgcgtccgccagatcgtcttccgccgcttaaaaataacaggcgggaatattgagaaccgacgctagtatttagggcatgcgtttccctccgatgttaacaggtgaaggaatgacacacaaagagactggcatcagccagatatcattgcagcattgcgtaagaagaaaaccaacatgtcggcgttgatacgttcgtcaggggtaagttggcccgcctgaatggcgttgacacattttccagacatcctgaggagaatggattcaaacaatatattaaacgtatgcaaggggattattccctatcctttaaagagcacgagataagggcgttaacaaatgcgctaaggcacagaaaaggagcaggaaagcggatagatcattcagagcgtggtctgcaatattgttcgatgcagtattaggctgcgcatgagcaacacggattgacctgctcaatgacggaaggctatgactgctatcagaccgcgcgggcagaaagaataaacgagatactgaagacagagtttttagtgtcacgcgcggtagaccaagctcaggccagaaagagaggggcggaatctatcgccatttataacgatgaacgaccccaccagtcactgaaattcagcctttataagtctgcatcacctttattcctgttcattctgtctatagttaatcctttatgtttcagcaggctatgtcagcccgctttacctctgaggagacttgtcaatgctattgccgttccgtcgttctttatttgcctcatcgtttctccttgctatcacctcgtccgcctttgcgactcccgccggtaatctgccgctcatgccttggccgcagcaggtagaggtggctccgcaggctgggaaatggagggtggacaacaggctgtcggtggccgtcagcggagacaatcttggctctctgccgcagcgctggcgcgaacggattgagcagcaaaccggatggacactacagccgcagccgaccgacgctacgcagagtaaaattcaggtggttatcaaacataaagtggatgccttgcccaaaccagacagtgacgaaagctatgatcttgaagtcaccccgcagggtgcgatcattaacgcgaacacccgttttggtgcgatacacggcatggaaaccttattgcaactgctgcaaaacgatggtgagaacacgttcctaccgttggtgagaattcatgataatccgcgtttcgcatggcgtggcgtgctgctggactctgcacggcatttcctgccggtcagcactatcaagcgtcagctcgacggtatggctgccgccaagttgaacgttttacactggcatttaactgacgatcagggctggcgattcgcgtcagagcattatccgaagctgcaacaattagccagcgacggcgagttctataccgtggccgagatgaaagatgttgtggcttacgcgacatctttagggatccgcgttgtgccagaaattgacatgccgggtcatgcctcggcgattgccgttgcttaccccgaactgattagcgcacccggccccttcagcatgcagcgcgagtggggcgtgcatgaaccgacgctggatccctctaacgaacaggtttacaaatttgccgataccctggtcggtgagctggccgccattttccccgatccttacctgcacatcggcggtgatgaagtgaaagatacccagtggcagaattccacggcaattaaggcctatatgaagaagaatcatattgccgatagccacgcgttgcaggccgccttcaacaagcgtttgcagcagattttgcaaaaacatcatcgccatatggttggctgggatgagattttccatcccgacttgccaaagaatattgtgattcaatcctggcaggggccggattcgctgggtgccagcgcgcagcagggctatttgggaattctgtccacgggtttctatctcgatcagccgcaaagctcggcttatcgctatcgcaatgaaatcctgccgcagccgttgggcgtcgatcaaaaccttgccgaaggtgaaaaagcccagagctgggcattttctatgccgcgtctgaaaggcagtcccgttgagggaagtttttccctgattgaagggaagcagggctggcgcgggtttatcgatttcaaggggaaaacccgtcgtgcgctgcgtgatattgtctggcagaacaacggtcaggtcagcttcgcggtggatacctggatgggcgacacacgtcctgtcctcaccctcaaagacggtaaatttgacggttactttgtgattggtaacgcgcgttatccagcaacgggcaacccactcagcgaaatccccaaggcacgccgccagtggtgccggacgccaggggaatgcaaaacattctcggcggtgaagccgcgctgtggcaggaaaatatcacctcagaaattcttgacctgaagctatggccgcgtgggtttgtggtcgccgaacgtctgtggtctgcggaggatgtgaaagatatcgacaatatgtatcagcgtctggcgaaagtggacgcctggtcggcagtatcggtagggttgcagcagcatgcagaaaccactcgcctgatgactcgactggcaaacagtagtgacatcacaccgctgctgacgctctcttcggcgcttgagccggcacagtattacagccgccagcacctgaagtttaaggccgggaactaccaacagtttgagccactgaatcgcctggttgatgcgctgccagcggaaagtaatgccgtgcgtcagctcgataatcaggtaaaagccttgctggctgacggtaaagacgtacaggcggcgagggcaattcgcaaccaactgacgctgtggcgggacaatagggcgcaggttgagccaatactggcgcaaaactacgtcttgaaacccgtacagcctgtggcggaacaactcagccaactgtcggtgctggggctgaaatggctggatagcatccaaagaggggaacacatcacagcggaggagcgccagaaggcgcagacccagctggacagtgcggcacagattcaggatgagttggtgattgcggcggtgtatccgcttcaaaggctattacaaggtgtgaaataaacaccttttatcgcttcaaggtctgtcgcttcaggcggcgactgtgcccgaagcgacggccaataacttcggcacctcaagggtgccgaagtcctgccattgacccgttaaatatcggctactcgtgatcttcgccatacagcccaatcaaccggcgtaccacgccgttagtccagccgaagccgtcctgtagaggatactcaccgccgccaccttcaccggaggcatcgcccgcgatgtggtatttttcgatcagcttatggttacgcttataaaactggttaaccgttttcagccagttgcgggcgatttcgtcacccagcgcgtcattgccatacattttaaagccctgaatggccatccactgtagcggtgcccaaccgttgggcttgtcccactgctcgccggtttcatattcggtagtcagcaggccaccgtcggaaagcaggcgtgcgcgcacggcttcacccaatctttcggcctgttcgtgcgtggcgagacccacgtacagtgtcaccacgctggcggcggagaagagcgcgaactgcttgcggtgccagtcatagtcgcggaaacatccctggtcttcgtcccacagataatggttaatggccaggcggcgttcttctgctttctggcgatacagcgcctcggtctcacggtcaccttttagcgctgaaatattggcaatcgtgctttcgagcttataaaggaacgcgttgagatccaccggaatatatttggtggtgcggatactggcgaggcgattggcatcacgcagccagcgcgaagaataatcccagcctgatgccgcaccggcacgcaggtcacggtaaacttcgtttgcagggcgattagagtgtttggcggtttccacatcctcgcgccatgactcatcgcgcggcgtgtccctgtcgtcccaataacgatttaacaaggcaccattcggcattttaaccgcatggcgataggcctgattggccccagcgattccgcaccgtccatccagaactcgtgctctttaatcaaatgatcgagataacgacgggcaccgcgcacgccatcttcctcaaacagctctaccatcagcgcaaataccggcggctgggagcggctgagataataggtccggttgccgttagggatgtggccgtaggtctcaatcatccaggcaaagttgtccgccatgctgcgcagcaaatcgtggcggccactttcggccagccccagcatggtgaaataggagtcccaataataggtctcgctaaagcgacctcccggaacaatgtacgcctgcggcaatgacagcagtgaagaccacggaatatgttgttctggctggcgcgttaataccggccacagcttatcgatatgttctttaagcgaatcaccgggattagaaacgtaatcgctgccgtaatgttttggcatccaaaaatgttcgtcaacaaactgcttaagatcgaatccgggattatttttctggcgacgatagccaatcaggatatccagcggatccattttaggtgcgcagtccggaaatgttttgctgtcctcgaaaatatgcgcagactgcactgctgcgaataattcaagataacgatctgccggcgttagcgcatcggaatggggcatcccctcaatcatttccggttctggctcggcctctagcattttatctagtgttaattcagagggttccggttcatatttgctgattttgtcgatgtcgaactccactgattcagtaacgtcgtgtaatttagagttgtacatataatgtcaagcctcttcattgcgtcgttaaaatacgggggcttcccgcgtgcgaatttctaataagtgtagacttttgcttcgcctatttcagtaaatctgtgtaattgctcacattacttaatcggcacataaagtgaaaaaaccttataagccgttatttaaccgttggaaaataaaagcaattagtctcaggatgcggaaaatatttacttaattcgtttgcaacactttgtgaatagccccgattttcggggctaaaggacgggagacgtcaacgttatggcgtggcggcttttgccgtggaggatttttcagagccacgttccggcagcgcacgaagatccttaaggtaggtttctccccagtgcgcaatatcgttctcgcgcagtatcttcatcatctcgttataacgggagatacgctcttcacgccccatggtcagcgcctgatcgagcgcagcggcaacttcatcgcggtcataagggttgacgatgagcgcacccgtcatctcattagcggcaccggtgaaacgtgataaaaccaacacgccagggtcttcagggtcctgtgcggcgatatactccttagccaccagattcatcccgtcgcgcagcggtgttaccagcccgacgtcggtaagtcggaatatcttcatcagcaggcgacgatcaaaatgctgattaaggtaatacaacggcgtgctgtttaagctgccgtatttaccgttgatgcgcccgacttccatttccagctgatgacgcaagtcctgatacgcctgcacgtcaccgcgcgacgtcggagcaatctgcgaataacgcactttgccgcgatgctgcggataatgttccagcagggcttcaaaagccaggaatcgctcaggtaaacccttggtgtaatccagacgttcgcaggaaataatgtttttcgcgttactcagctcgcgtttcatcatgtcgattttcggcggcagtggaccctctgccatctgtttgatgctgtccggcgcgatgcttatcggatagacctcggtcttgaaggtatggccaaaggcgcggtgggtattgggtgcaacgtcttcgagggggtcagctggtcaaggttttcaacgaacgcattgcggtcggtttccgtctggaagcccagcagatcatactcgcacatcatttccagcagttctttatgggtcggcagggcgttgaacacctctggcgtcgggaaaggaatatgcaggaagaaacctatgcggttcgtgacgccgattttgcgtaacgcggcggcaaacggcagcagatggtaatcatggatccacagaatatcatcgggtttgatcagcggctgaagctgtctggccagcaggtcattgacgcggcaatagccttcccacgcctcgcgctgaaaatcgaccaggtcaatgcggtagtggaaagcgggccagataacagcgttggaaaattggcagtaataaagatcgtaatcgttctgattaagcggcacggtggcgtaagtaatgccgtctttctcgacgatatcaagctcttcctcttcttctcccgatatctcgcttatttcaccactccagccaaaccacaggcctgacgtattcttgagggcatccatgatgccgacggcaagtccacccgcgctcgatttggatttattaggaatagcgatacggttagatacaacaaccaggcgactcataatcttgaccccttacctacgttattatgtttgatttgtgaaagcagttgttcaagccagtcatacacgtcggcgacgtcattaagacgatagtgagcgtggcccgcccttcaccgactttgactgaaataccctgcatggcgttcaccgccagaaatcctttttcatccgtaaggtcgtcgccgacgaatacgggaatgcggcccttaaagggaagttcttgcataaaagctcgtattgctgcgcctttatcggtgcctgcggcttaatctctacgacgcatttgcccggttgcagctggaggccagggaatttttctaccgctgattctgccagtgccaatacctgatgttcaaaagcggggcctggcgatagtgcaacgcaaaggccatacctttggcttccagcagggtgccctgcattgccgacatgccctgttgcagcatgttttgcaacggcgttaccaccttttcggaaagcgtgacgcgatgcagttgagactcggcatcacgtcgttctgcaccgtgaacgccggcgagcgggaagcgatgcggtgcgcttagcgcgtcgagttgagcaatcggacggccggataccagcgccagcgcgccgtctgtggcctgcgacagcgccagcagacgatcgcgtacaattaagggaatgctcacggcgtcgggctctgcctgaagtgcagccagagttccgtcaacgtcaaagaaaaaagcgtacaggcgtccttcctgaaggggggaggcggtgtatcggtgatattttccggtgcaacagtagtcaatctttttctcctgtttgcaaagggttaggcgaatttattcgcgatagcattaaagccttaagttaaatttcaggactcaccagatcacaagaagtgtttgatgccgctataaaataagaaaaaatggcatcagaagggtgaatgaaatccagaaacctcaactctgcatttaattttgtagtattcagtgtagacgctgctggatatttttccaggtatctacttaatcagaacgtgctgcataaatagtgagtctataaattaaatttttatttctattaaattaaaggagtattcttatagagttaatgagactttttataatgccaatagggagaggtttctaaagccaggctatttatgtttgattgcccggcattattttttatcaataacaataaacatttactcaataatagcgttcactttataagcatggtggtttcatatttaagaatatttaaattgaggtgctcttgctcctatgcagaaatcgccacctgctacacttattcctattcgtttacggtgtcagagataaggaataacgatggcgagcaacaaaacggtcggtgcaggattaccggaaccgacacataccttactgttgagcggtaacgacgttgagcaaaaacgcgatgaaatccttaactatttcactcaaacctgggcactgtacgagagtcttttcgactgtctggccaatgagcgcgcctacttcactaaagcaatctctctgcgtcatcccctgattttctatttcgggcatactgcgaccttctacatcaataagctgatggccgccgggcttatcgaggatcgcatcgatccgcatattgaagcgatgctggcgattggcgttgatgaaatgagctgggatgatttggataccagccattatgactggcctgcgctggcagagctgcgtgattatcgcggtaaggtgcatcgcaggattattgaatttattaaagaaatgcccttatcgctgccgatcgattgggagagcccggcctgggttatcctgatgggcatcgagcacgagcgtatccatcttgaaacctcgagcgtgttgatgcgccaactgccggtcgagtggttacagcctcagccgcactggccagcgtgtcaacgtgcgcgcaccgaccgaactgccgcgcctgaaaatacgctggtttctctgccagagaccacgttgacgctcggcaaaactgacgatacctatggctgggacaacgaatacggccgccttgactgcgacatcaaagcgttcaaagccagtaaaatgctggtcagtaacgccgagttttacgagtttgtgcaggctggtgggtatcaggacccgcagtggtgggacgaagaagggcaaggctggctgtctttctccaaggccgagatgcccacattctgggttggcgcagcatccaaaccggctatcctgaaattgaggctgctggccgaagaggtgccaatgccgtgggactggccggttgaggttaaccagcttgaagcagccgctttctgccgctggaaggccgaggataccggtaagtcaatccagctgccgaccgaggcagagtggtacgtgctcaggcagcaggttgagggcgaccaacctggctgggatcaggctcccggcaatattaaccttgcgtggtgggcctcaagctgcccggttgacagattcccgcagggtgatttttacgacattgtcggtaacgtctggcagtggacgactacgcctatcagcggcttcgatggcttcaaggtacacccgctttatgacgacttttcgacgccgaccttcgacggtaaacatgccatcatcaaaggcggcagctggatctcgaccggcaatgaggcgctcaagtcttcccgctatgcgttccgccgtcatttcttccagcatgccggttttcgctatgtggtctcaactcatcaggagaaattaaccgtcaatccttatgaaaccgatcttctggtatcgcagtaccttgatttccaatacggcccgcgctatttcaacgtgcctaactatgcacgcgcgctggtggatattgccgagcaggtggttgaaaaacgtggctctgcattagacattggctgcgccactggccgagccagctttgagcttgcgcgcaccttcgaccaagtgacaggtatggactactcggcgcgctttatcgacgtcgcgctgtcgctggtgcggggagaggaacgacgttatctgatgccggaggagggcgaactggtgcaatactgtcaggctagcctgtctgagataggtattacgccagagcaggctgagcgcgtgcagtttgtgcagggtgatgcctgtaaccttaagcctcatagtgaaagttatgatctggttctggcgtccaatctgctggaccgcctgcgtgatccgagacgtttcctgcacgatatctcagccaaaatcgtcagcggggggtgctaatcatctcttctccttacacctggcttgaggaattcacgccgaaggagaattggattggcggcgttcgcgaaaacggcgaggcgctgagcagttatcaggctctacagcgtttactggacggtgactttgaagaaattaacccaccgctcgatgtgccgtttgtcattcgtgaaacggcgagaaaacaccagcataccgtggctcaggtgaccgtctggcgtaagcgctgatctccaggccggttcggtgcagattgaaccggcctattttctcaggtatttatcaggtcttgatcagattctcctcaggttaaaaagagcatatttcgctcattattaggatgcagacaacgaataggccgaaacattaaacggtattctcgttaatttattaaattaacgggttgatggcttagcgattttttgcggtgcgctagctgatttttttattattattaattttatgatctgatttttatctgatgtttctattgcgataaatttaacttattaactatagaattatttgctttattaacatgagtaaatcctgaaaatgcgatgtttttccatggttagcctgaagctaatatgttatgtttcaaaccgatttattacttgaggtgataaattatgcaaagagcatcatcaatgatgtactgttaattttttttataaaaactctcctgggtcactttatggataaggaatgttctatggaaagtaataaagtgcctttaagagagggggtttattataattcaacccattcttgtctggagagtcctgacggagacatccatctcacccctaacgagaaaaaaatccttgaaataatattggacgatcggggcaggaaggacgtcattattgaagaaatttggcaccagcaaggcattatcgtcagtgagtcgagctatcaccagctggttaaaatggtgcgcagaaagttcgccgcagccggtttaccgccgtcctgtctgaaaactattccccgttatgggatggtttttcgtaacgagccagatacagagcctgtgaatggcgctgattactctgatattactctgagagaacctgaaaaacgcgactgccgtgagtttggaaattcattagcgataatgcgtgaaaggaaggagataaactctgaagcacaaccttctgatgaaacagcattagtccctaaggatcaggatattttacttattcattcaaataatttaaaaattgcagctcgagacacccgttttagtattccttattatttatcaatttttatttttgtcgtttcgtttatctcgattatctcttttctgattagttatgatactcaagagtatttcgtgcaggtaaagaaggttgacaatgtgggttatcatgtcgccccgacggctaaattatccgaggcactctggcaacgcattgaaagcactgtcttgcctgtgacaaaggaagtctatatcgcatccaatggtcccaaagtatgggtggcttactgcgaaaatagtatttataaggataatgtgccgtgtacttacgaacatttttcattgtactagctgccgttatggcgttaacaactgctggatattacctcggcaccaaagtgctcttcgataaatcgattcccgatgcgccctgcagtatggagatagccaacggggcttttatcaatgacgaataccagaagtatcaattcaacggtgcaatcacgctgtggctgaagaacaatatgatcacggtgtttggtgtatacgacacggccgatgggatgaaaaagttgacccgcagtatcctgctggatcacataaaaagaaagtcaaaggtggtaaccgctgacgtaaaatcaaccgccatcgctccctccgacgaggtgcaggggctggagagtttttttgccagtaagggcgagccgctaacctttcactttcaaagaatcaagagcggagaatatctggtaacgattaacaataactgggttgctctctgtaaggagcattaactcctgtatgaatgaggccataactattttgagcgaaaatggccgggtgattcaccgtagaatttcaaaaaggcgcggcgcatgcttttggtgcctgaaaaaccgcaaaggctggcaattttttcaagagaaagtcgagcctgtatcacatgctggcgtgcaacttcagccctcatctgagccaccgccttagcgggagaggtacctgtctcttctttaaagaggcggctaaactgtcgggggctgaggtgcgttagctctgccaattgggtaatggtcacggtattgcgcagatgttcacggatatagcgcagcgacaggtttattcgctcactgtttccatggcaagaaaagttctgcaataccgctaactgactgttgttgacatatttatcgaacatgcgctcgatgatattcatcagctgcatcgtggtgcccggtcccgactcttcctcaataattgttaaggttaaatctattccggcccagttaccgctggcggcccagatatgattatttagcagcaggacggattctttttttaaattgacgttcggaatagcccgactgaacgttgaaagctgataacgtacttctttcttttcaaaggcggctaaaaaagacagcggcgacgtccattccgatgaggttgtctgctgtttgccgacatacttgaccttatgactcccatcagcgggcgagggctggcagggtgaggtattccagaataagcaactttcctgcggattctccataatgaacatgctgttaagggaacataaggttttgaagtttgcaatactagattcaaccgggatcttgcaggcgctgtaaatggtacctccgtcggccgagagcagagtaagctgatatctcttttgttgtttgcgaattgaatttgctaaatcgagtgcggttgataatcgcgaaagagttaacatattaaatccattagaaataaaacagcctatttttttcattttggtcgctcagtaatctcaaatcatccggtatgagtgacttgtttaattttttatgactttatttataattaacttatagccttttattgaataaatgtatgtttttaattaagcaataataaattgaaatgacagtttacgtcaatctccaagccgagcattgaagacctcatttattgatctggttgttattttgttgattaaagctgtgcttttttatattcaccccttctaatttaaatttatttaatatttcgatggtttataagggttaaataaataaccaacaccaatggttaactgccaaataatataaaatatttatgatttagtatttttttaatcccgcgatgcataaacctcaataatatcaatgattcaaaatgagagagtgctcggtacaggccggttgatttttcactatgcttggagatgccttttgtttcacctcatcccatgctatcaaaacaacaaggagttcaccgggtatgtctaacttttttatgaacgaccgcaagtcgctgattaatgacgttatcgaaggcgctatcctctccacccttacaagaatctggccagacttgacgtcgattcggcgatacgtgtcgtggtgagaaacgactgggacaagaacaaggtcgccctgatatccggcggtggttcaggccacgagcccgcacacgttgggtttgtcggcaaaggtatgctgaccgctgccgtctgcggcgatgttttcgcttccccgagcgtagacgcggtgcttaacgctatcgtcgctgtcaccggtaaagcaggctgtttgctgatcgtgaagaactataccggcgaccgtctcaactttggcctggccgccgagaaagccaaaaatctgggctatgacgttgatttagtcatggtttcagacgacatcgcgctccctgacaacaaacagccgcgcggcatcgccggtacggcgctggtgcacaaagtggcaggctatgcggccgaacagggaaaatcacttaaagaggtgacccaacttgctcagcaggccatcgacgcgacctcgagcatcggcgtcgcgatgcatggctgtaatctgccgggcgacggtgatgaagaggagaacgaccgtatcgctgcggggcacgtggagctggggctgggcattcacggcgagccgggagtgtcggtgctgaaaacccacaatagccaaaagatagtcaatacgctggttgaggcgctgcaaaagggcctgaagaaaaaggacaaactggcgttgcttatcaataacctgggcggtgtatcgccgctggagatgaaccagataaccaaagagctggcgcattctgggctgaaaaatgccataacttatctcatcggtcctgcggcgctggtcagtgcgctggacatgaaaggcttctcactgtcggccatcgtgctcgacagcaccattgaaaaggcactgctggccgaggtcgaggcagccggctggcatccgctggtgaagtttgaaaaagtgccgctgcagaaggcgaaaaaaatcactcagaaggtgaaagttaaatcctctgccaacgccgaggtaggcaaggtggtcaaggtcatcaccgagacgctggtttcgctggaaagtgagctgaacaagctcgatgccaaagtgggtgacggtgacacaggatcgacctttgcttcaggcgccaaagatattcagcaacagaatgaaggcaacaagctgccgttgaatgacctgtctgcgctcttcagcgtggtgggtgaccggttggctaccgtgatgggcgggtcaagcggcgtgctgatgtctatcttcttcactgccgcagggcaaaaggtggcggaaggcggcaatctggcccagtcgctgctgtttggactggaaagaatgaagcactacggcggggctgatttgggcgacagaaccttgattgacgctctccagcccgcgctcgaggcgctcgacaagaaggcgggagacgtgaagggagcctctaaggctgcggcaaaaggggccaaagataccgccagtatgaaaaaggccaatgccggtcggtcgtcttatctgaacagcaacagcctgaaaggggttaaagatcccggcgcggtggcggtagaaaaagtctttgccgcactgttggaaataaaagggtaaacccaaaaagccccgatgcaactcggggctttaccttttctagctcggccaacggtcgagaacgattcctctatgctcggccctcgagccaaactccgcaagcagcgctttgacgtcggggtccatataccccgcattgtcatgctcgaccctgaccacgctgttgtccgggatttctgccagcaggctttgcaggcgcggactgtgcaggaacgtcaggttctgctgaaagcgcatcacgtaatgattatcgtagcgcgtcagctgtagcgcattgctgtgactcttgtaagtgctggtcagcagctgcgccagcaaacccatcccgataccgactagcatgccgaacaccatgatgccgacaatggttgcgatgaaaggcacaaactgcgccaggccaagcttccactgtgctttaaacaactcgggtgaggccagtttgtagccggtatacagcagcaccgtcgccagacaggccagcggaatggtattaagcatctcgctaaagaatatgccgctcagcaggagcagaatgccgtgcagcaggatggaggtcttactgcgcgccccagcgttgacgttaaccgaactgcgcacgatgactgcggtaatcggtaagccgccgagcagaccgctgagcatattgccaatgccctgcgcccgcatctctttatccgagcagggcgcgggcgtttgctgcttcagtttttttagcgcttcctggctcagcagcgtctccaggctggcgaccagcgccagcgtaatcgcgacgacgtaaacggagggattggtccacgcactccagtttgggccttcaagctgcgcggtcagttcgccgaagctgtcgaatgagggaagcaaaatacgcggcatgccctgaatactctcggggaaaaggtttccgccaaacaccacggcaagacttcccacagcaccgccaccaatgggccaggtacgtaggtcaaaaatttgttcttcttgaaggcaggcgttgcccaaagccagaggataaacagcgagacaagtgccacgcccgcgactaccggtgagagatgaaaagaaggatcgccgaagatgccccgtagccctctgtttccttcatagcccagtgcaacggggatctgctgggtgatgagcagcaggccaatcgccgccagcatccctgaatcacgctgccggggatcagtcgggcaaaccgcccggccttgattatcccgaagacaatctgcaacgccccggccaggatcaaggccagcagcagggaggagaaggagccgagggtttccatggccccaatgacgatggtgaccagcccggctgcgggtccgctcaccgcaaaacgcgacgggctcaacagcgtgaccaccacgccgcctatcacgccggttagcaggcccacgaaagggggcatgccgctggcctgagcaatgcccagactcagcggcagggcgacaaggaaaacgacgatacctgcgggaatatcgtgacgaagtgcgttcagattcatgatgcgccctctgctgtgctttgatgcaccagctctttgagatgtccgctgtgcagatcatacacacagccaaatacgttgagagtatggccctgagcccagcgttgttgcaccggtgcggtggccgtcaggttggcaaactgggttagcacgttggcttccaccaggcgatcctgccgcgtgctttcgtcctgtgtggggtctggcgaagggttcaggctctcgctcaatgcttggcgaagcagaccaatacgtcgggagagggcgttatcctgtgcagccagcggcatatcggggagtgcgctggcagcttgcacgccgccgcagccgtaatggccgcacaggataattgcggagaccttgaggtattcgagcgcgtattgcagcacgctaagcaggttatcgtcatcgctgaccaccatattggcgatattgcgatgtacgaacagctcgcccgggtgggaaccggtgagcacttcggcagggactcggctatctgaacagcctatccatagcgaatgaggctgctgcggctgggccgtttgttcaaagtacttgggactgcattggcgctgcatcagcgcccaacttcgattgcgagccagcaggggttttaaggttgtcacgatgtgcttctctctgtcaggggaaaagacggcaatgagccgctcgtccggtggctatcaacgtttaaagatttactacctttaattacgactggaagcttattgatacattttttaacagattagacggcatcaatgccttaggacaatcccctgttttggatcccctcgcagcaattagataaaatttgtgaatgtattcgcgctaatctctgtgatttcaggccttgaacaaagattatccatcaatttggcttaacttattttctgatgaaaattacagttctttgcaaaacgaaaccaaaaccggacattaaatgctctgcaaagtggtgcgcgatgagaaaaattgctatatgctactagttatcattatcagttaactgagggcagcatcatgattgcagcgatagttacggcgtgcggattgtggggagtcagttggtgtctcggaaaacgtctttctagcgcctggggcgttctattgccctgcgcgctgctgcccattctggcgctggccaatatgacgctggaacagctcaggtatctggtgattatcgcgatgctggcaacgctggtgatgttgcttaacggaacgtggcgtcactacgtcctgctgccatcattcgtggcactggcgggtggactggcggcgatatcggtgaactttaatttgatgtaacaatgcagaatatagagctttttgggattatctaaaaagattggcttatcgaacaaaggattgtactgagggagttttacaacaagggaatatcagggagggattacaggagtcatctggtgcgaagagagggacttgaaccctcacgtccgtaaggacactaacacctgaagctagcgcgtctaccaattccgccaccttcgcacaaatgattactcttactgcttattaacatcgttcatacatcacagtggtgcgaagagagggacttgaaccctcacgtccgtaagaacactaacacctgaagctagcgcgtctaccaattccgccaccttcgcaacgttctgcgttgtactacatttgatgcctgtgattgttggtgcgaagagagggacttgaaccctcacgtccgtaagaacactaacacctgaagctagcgcgtctaccaattccgccaccttcgcgatccgtttcttgtcacatagatttcgtctatacgactaagacaaccacggggccgaattctagagattttcgcgagggcgtcaatacttatttcttctattagcggtgattgttgtaaaaaacagcaaatcagagccgaattagccatttcgagacgagatagcgcctttatcgttggttttatgaacgtttattttttgctacagcctcgaaaagagttcgatgagccagtcaagcagcacccgaacgcgggggcgagaaaacgccccggtggatacataatgtacaatggcatcgggggcggtataaattcaggtagcacctcgaccaactctcctctcgccagactctgactgacgacctgcctcgaggtctgtatcagcccatagcccgcttttgcggccgcgatataggcatctgccccgctgaccaccagactgttcgccatctgcactgtctgcgtcttcttgtttaccacaaattccagctgtgactctggcgctggtgggcaaagaaatagcccacggcctgatgctggccgaggtccatcagtgtctgaggctggccacagcgcgcaagatagtctctcgacgcacaggtcgtctgggccagcatggcaattgggcgcgactgcaggttctcactctcgcccggccaggcgcggatcacgcagtcaacgccctgatgcagcatatcgacggcgttgtcgttggcgctcaaggtcagattaatgtgggataccgtgcagaaaagtctggcagtgcaggtaacacaatttcacgcgccacggaatgcggcatgtcgatgcgcacattgccttcaggctgaagttttcgatgggcaaacaggttatcggcctcgtcaaacgccgagattaactggaggcagcgctgataatacagttcgccctcttcggtgatttttacctgccgcgtggtgcgcaggaaaagtcgcacaccgaggcgttgctcgaggtttttgagcgtcgtgctgaccgttgcgcgcggcagctcaagatcttctgctgcgcgactaaaactgcctaactcggtgatgcgaataaagatccgcatagcctgaatctgatccacgaagagcctttttaattggttgcgatttatgaacagtgttgcacaaatcggcgtatttatctttatggcttaaacaaccaaacttctttccatcttctgaaaaagggttaaggaaagcataatgaaacaacgtcaattaggtaaaaacggtccgatggtttcagctttagggctcggttgcatgggaatgagcgagttttacactcagggcatggacgaaaaagagtcgctggcgacgctggaccgcgccattgagcttggggttactttgtttgataccgccgacgtttatggtccgcataccaatgaggagctgctcggcagggcattgcaggggcgtcgtaatcaggtctttctggcgactaaattcggcatcgttcgtgactcggccaacccgttggcacgaggctccaacgggcatcctgactacatccgaaaatcggtcgaaggcagcctcaagcgccttaataccgacgtgattgacctctattatcagcatcgtgccgatccgagcgtaccggttgaagacagcgttggtgcgatggcggatctggtgcgtgagggcaagattcgttacctcgggttgagtgaagtctcggcggccacgcttgaacgagcgcacaaagtgcatccgattagcgccttgcagactgagtattcgctgtggagtcgtgaggtcgaagaaagtgttctgcctgcctgtgcacgtctgggcatcgcctttgtgccctacagcccgttaggtcgtggatttttgactggcgctattcgcacgccggacgattttgccgacaacgacttccgcaaaggcaatccgcgttttcagggggagaattttgccaaaaacctgcatctggttgacaagatagtggaaattgccagagagaaaggcgttaagccttcccagctggcattggcgtgggtattggcacagggagaaaacgttgtgcccatcccgggaactaagcgtcgcacttatttagaagagaacatcgccgcgcttgatgtcatcctgaatgaagccgaactcgcggcgatcgatgcggccttcccgcagaatgccgccgtgggggaaagatacgctcacgacgtcatgcaactgattaatagctgaatctttcaaactacagcaggttggcggctttcggttatcccagtggctgacttatgtcagcgcctggagattgctcccgttgccgcctctctgtcgcgttaagctattacgggggaattaacgctttttcttcttcacgtcgcgcggtgggcgaccacgagtggcttcgtacaccttgaaacgaccattctgcgccagcacttcatggctgccgaaggtggcatccagcagggcggcgtaaggcaggaaggcgttagccacgatgcgcagtttgccgccgatgttcaggtggtttacggcccgcggatcagctgctcggccgcgtgaaggctggtctgtaagccctcgtggaacggcgggttggagataatcatgtcgaaacgcccggtaatgtcggaatagacgttactggcgatcacctcacccgtaaggccgttcgcctcgagcgttgccttactggctgccagcgcaggggcactcacgtcactcagggtaactttcatcttcggtgagtaggtcgccagcaccgacgccagaacgcctgaaccactggcgatatccagcactttacctttgattggctcttcgaagctgttgatcagcaacaggctgccgctgtccaggccttcacggctaaacacgcccggcagggtcttgatggtgacttcttcaaccatgtaggtctgccaccagtcttctgcatcaaactctggctgtttttcaagacggccgtgatacaggccacagcggcgggcgctgtcgactttatcgagctggcaaatctctcccaggatctcttctgcgctgcggactccgctgcggttttcacccaccacgaagacgtcaatgccgacaggtagttgggaaagcaggttgaaaagctggaacttggcttcctgtttgctctttggccagtagtagacaagcatatcgctcgacgcgataaactcggcatccgcgaccagaccaaactgcacgtcctctttcatcgaggcgttgagcatctgccagtggtggtattggttggtgtggactcgcacactttcggcgtcgaaatcggccggcaggtcatcttgtaaatcaccggcgaacaggacgcggcggccaataaaatcatcgctatggcgcagtatgacttcactggccggggttaatgctgacatcagataaggctcctcaggaatatggggcgcattatagaggtttattggcgcaggttcgatgtgtttgctagcatagcgcgctataagagtcgccgacgggcaggaaaaaagcatggcaacaagacgagactggctattacagcagctgggaattacccagtgggcgctgcgacgccccacggttttacagggtgaggtcgccgtcagtttgcctgagcacacgcagctgttaattgttgccgacgtgctgccgcctgaaggtaactcactggttaatgacgtgattcgcagcctaagcctgcatccctcgcaggtttactgcctgcaaacggatcaggttgcgatgctgcctgaagacacgcactgcaatacctggcgactgggcatcagcgaacctttgacggtcgccggtgcgcagttatacagcccggcgctggccgagctttctcaagacgctggggcgaaacgcgcgctctggcagcagatttgtgaaaatgaacaacatttctaccctgacagccgcggatctgacgcgcgcctttgagattgaacaagccagtcacgcctttccctggagtgaaaaaacctttgccaccaatcagggggagcgttatctcaatcttaagctcgaacggcagggcaagatggtggggtttgctatcgtgcagacggtactcgacgaggccacgctgtttaacatcgctatcgacccggcgtatcagcgtcagggattaggccgtttactgctggaagaagtgctggcgcagcttgagccgcgcgacatctttaccctgtggcttgaggtgcgggcgtcgaatcgtggcgctatctcgctgtatgaaagcatgggttcaatgaggtctcgattcgccgtaattactatcctgcggcggcgggcgggaagatgccatcatcatggcgctgcctttaggataaaaaaagcgggcttttggcccgctttttacatttcgacactagggttattgatggccgtgcgttctgtgcttggtcacaaaaccgagaatcacacacatcacgaacaccacgaagtaaagtccgttcgccgttgccagcgctgcgtgtgcaccgctgtgggcgacgatagggccagtaacaacgaaggtcagcatcgtgccgacggtgccgcaggtcagaataaagttcaccagcttcggtgaggagactttggtttgcagcgagccgagggtaatgatggtggtataaatggcgctggaaacgaagccaaggccgagaatcgcgtaggtcagatgcgccggattagcggtggagatgaacagatacatcgccacggtcgccagtgcggtcagcagggttacgatgcgctgtaggtcgaagaaacgcagcaccacgctgaacacccacataccaatcatgtacgaggtccagaaatcactgaccagcttaccggcctgattgatgtccaggttgaaggttttggtcacatactccggcacccactgaatgaagcccagctggccgaggatgtagcacagcgccgcaatcgacaggaacagtacgccaatcccccatttctctttcgcgaccggctgtgcgttggtgtcgcctttattgcccaagaccgggaattcggccatcagcgtcagcacaaaaatcgccagatagataacgccgatgcaggcatagacccagtaccagcccacgctgcgcgccagcagtacgcccgcaattattgggaaaatcatgccggccatgctgaagaaggagtcggtaaacagcaggcgcgatccgcgctggcggccttcataaatatgggttatcaggaaggtaccgatcgacattgtgatgccgctgaccaccccgagtatgaacatgcacagtgagaagacgctgatacttttactgaacatcaggcccgcgaccgccagcaccatcagcacgaagccgaaaatgagctgacgtttcagtgggataacttccatcaaccaggcattaaggaagatagctatcaggatcccggcgttcaggaaggtaaaggtgttgctcatgctggaaaccggcaggccgaaatattcggcgatattgcccataaccatgccggtaacaatgaccagtgcgccggtcaggccgtaagagaaaaagctgatccaggtgagaagcaatcgattacttttagtcattaagatacatccttgtgatgtataagaggttaaaaaaacgctaaaaaagagttcagataacagcagcacaggctgccgagtcatgccgtacaacttttattggccgattatccagaaaggaacggaccagttttgtgatgggacgggtatttttaatgcaagccgtaaagttatgcaaaattaatatgtgattcaggtcacgttttattgaaaattgcgagaaataaggccaattttcgcccatttaagccgcctccctcaatctcctttttcgctgttacggcagcgaatgtaaaagcattgattgtctatccctgccaaatcatagaaaatagccggctataacttttattaccgctttgcctgatgccgttctggctaaaatcaataccgatgcagggcggacaaccgcagaaacgtggaaaaacatgtctcctagtgaatacgccctcgaagtcgccaaacgtcgcaccttcgccattatctcgcaccccgatgcgggtaaaactaccatcactgaaaaagtactgttattcggacaggctattcagaccgccggtacggtaaaaggccgtggctctaacaaccacgccaagtccgactggatggagatggaaaaacagcgtggtatctcgattaccacttccgtgatgcagttcccttaccgtaatgcgctggttaacctgctcgataccccggggcacgaggacttctccgaagatacctaccgtacgctgaccgcggttgactgctgtctgatggtaatcgacgccgcgaagggcgttgaggatcgtacccgtaagctgatggaagtgacccgtctgcgcgatacgccgatcctgacctttatgaacaagcttgaccgcgacatccgtgacccgatggaagtcatggacgaagtggagcgcgagcttaaaatcgcctgttcgccaattacctggcctatcggctgcggcaaactgtttaaaggggtttaccacctctataaagatgaaacctatctttatcagaccggtaaaggccacaccattcaggaagttcgtatcgttaaaggattgaacaatcccgacctcgatgcggctatcggcgaagagctggcatcgcagctgcgtgacgagctagacctggtgcagggcgcttctcacgagttcgaccatgaagccttcctgagcggtgacctgacgccggtgttcttcggtaccgcgctgggtaacttcggcgtagaccatatgctcgacggtctggtcgagtgggcgcctgcgccaatgccgcgcaaaaccgacgtgcgcgaagtcgttgccgccgacgagaagttcactggttttgtgttcaagattcaggccaacatggacccgaaacaccgcgaccgcgtagcctttatgcgcgtggtgtccggtaaatacgaaaaaggcatgaagctgcgccaggttcgtaccggtaaagacgtggtgatttccgacgcgctgacctttatggccggcgaccgttctcacgttgaggaagcttacccgggcgatatcatcggtctgcacaaccacggcacgattcagattggcgatacctttactcagggtgaaaacatgaagttcaccggtatccctaactttgcgccagagctgttccgccgtatccgtctgcgtgacccgttgaagcaaaagcagttacttaaaggtctggttcagctgtcggaagagggtgcggtgcaggtgttccgtccgcttatcaacaacgacctgatcgtgggagcggtgggtgtgctgcagtttgaagttgtcgtggcgcgtctgaagagcgaatacaacgttgaggcgatttacgagtcggtcaacgtttctaccgcacgttgggttgaatgctcagacgtgaagaaattcgaagactttaagcgtaagtgtgagtttaacctggcgctggacggtgggacaacctgacttatatcgcacctacgatggttaacctcaatatcaccaaagagcgttatcctgaggttgatttccgcaaaacgcgcgagcattaatctgccgcacgcgttttcagcgtttcaaatttctcctaaaagacggcgcaagagccgtctttttttatgatttttttctgaattttagtttcattgtgaaattactttgcacatttttgtcggttttttcgcctataatggcctaaaatgctcggacttatctgtattacaggttaattagccattcttactacagttttgttcatggtcggctatattaaataaacgcacaacgaaaggcaggtttaaacgctggcctcgggattctaagtagagacttgtgctgatttattagaattcacagtgaagtgtcacagtaatgaatttaagtcgccacgaccatgtggtgtacagagtcctaaatttttgggctcccaaacagttaaggaagaaatcgatgaaaaagtctaattttgcatactcaatgatggccgttgttctgggtaccgccctgatgagcggtagtgcactggctgcaaccgctgaaagcacgatgaattctgcgggtgcaaaaatcgatagctccatgaagaaagttgatggctacatgggcgatagcgccaccacagcaaaagttaaaagcgctttggtagacgataaagcaatcaaaagcaccgacatttcagttaaaacagacaatggcgtcgtgacactgagcggtttcgtcggctctcaggcagaagcggaacaagctgtcgcggtagccaccaaagttgaaggcgttaaatccgtcagcgacaaattgcatactaaagacagcaagactcagtcagtgaaaggctatgcgggcgacaccgccaccacgacctccgtaaaagccaaactgctggccgatgacatcgtgccatcacgcatggtgaaagttgagactaccgatggcgtcgttcagctgtcaggtacggtaaaagatcaggctcagtctgaccgcgctgaaagcgttgccaagaccgttagcggcgtgaagagcgtcaaaaacgacctgaaagttcagccttaatccctctgaacgcgttgcctgccccacggtgggcaacaaccctgacagttcttattgttaattagaaaggtcagcggcttattagtagaaatttttggaaccacgagtactgaataaaatagaacgattaacgatttttttacctgaaaaatcactgagttttcatccgttttgtttttttcaagctatctttaatactgtacatcttattaagtatctacagtaatagccgttattcaggacgcatttgttaaccgagtgacgtacgaatattttaaatagggtaaggagaagcttatgtttcgttggggtattatatttcttatcatcgcgttaatcgcggcagctcttggtttcggtggactggcaggtacagcggcctgggctgcaaaagtggtcttcgtagtcggtatcatcctgttcctggtgagcctgtttaccggtcgtaagcgtttatgacgctgtgaagactaaaggataaactgatatttatctgatatttcccggagattaaaaggaataacctcgtaaggcgcagggatgtaatggaagagcctgatgttattcataagcgttatttcccatgccgtatccatgatggaaactgcacctgatttacaggaagtaacgatttaatctccgggattttgcaagaaagtgacggatcggtaaaagacggagtatgctcatcacaaagaagtgatttttgaggagtcttcgttgggatacagaataccggtcacgctgggtaacattgagcccctggcctataaaccctacatgccgggtaaaatcgcgttggtttgtgaaggcggcgggcaacgaggcatcttcacagcgggtgtgctggatgaatttcagcgtgcaggcttcaatccatttgatctcctgatcggcagttctgccggtgctcaaaacctttcagcgtatatatgcggtcagccaggctacgcccggcgagtcatcacgcgctacaccaccagccctaatttcttcaatcctctgcgatttgtgcgcggtggacaccttatcgatctcgattggtacattgatactatttctaaaaccatgccgctggcgatagacaccgccgaaaagctgctgattgatggccgggaattcctgatgtgtgcctgtcgcagtgacgactatgagcccaactattttgcccccacccgcgacagctggctgccggtgattaaggcctcgagcgcgattccgggtttctaccgcatgggcgtggacctcgacggtatcagctatcaggatggcggcattagcgatgcgattcccgttgaggaagcctaccgtcgcggcgccgacacgattgtggttatccgcaccgtgccttccgcgatgttctatacgccgcagtggatgaaacgtatggagcagtggctgagcgagagcagcctgcaacagctggtgcacatggtgcagcatcatgaaaagagctatcaccgtattcagcagtttatcgagaaccccctggcaacctgcgtatctttgaaatcttcccgccgaagccgttggccagtcatgcgctgggcagtcgcttaccggctctgaaccaggattatcacctcggacgccgctgcgcgcgctatttcttgtcgattgcctcgcactggctcatgcagcgtgaaaatgaccagccgctgccgatcatgactccgcgtccgagaagaccgcagatagtcgtgccaccgattgtctcgcctgagattgaattgccggttagcccggtggcggctgcaaatcagtctgacctgattattcctgatactgccgtggccgatgcccgccttgctgacccgattgcgctgtctgatagcggtagcgagagtcctttcctgcaagcggttaatgcttttaaggacgatatttcaaccgccatcagcgcgctcgcagtcagaaaatcagcttctgagatttccgtcgagcggccaaagactgagggagaaggagacaagctgtgaagccgcgattgatagacactcactgccattttgatttccctcccttcagcggtaacgaagttcagagtctgcaaatggctgccgaagcgggcgttaaccaattgattgtgccggcggtcgagtcagcacattttgcccgcatcgaggcgctagccgaaaaacatcctcaggtttttgccgcattggggttgcaccctatctgtatcgcctcgcacagcgaagcctgccttgagaagctggaccaacgtttatctgcacagaatgaaaaggtcgtcgccctgggcgaaaccggattagacctttatatggaaacgccgatgtttgataaacagcagcgtttcctgcgggcgcagttcaagctggcgaagcagtacaacctgccgattatccttcattcgcggcgcacccatgaccccttgccgccatgctgcgtaaagccgcactcccggcaacgggcgtggtgcatggttttgccggcagcctgtcgcaggccgaagccttcgtgcgccttggtttctcgataggcgtcggtgggactatcacctatgagcgggcgcataaaacccgtcaggtgatggccaggctaccgctttcatcgctgttgctggagaccgatgcaccggatatgccgttacagggctttcagggagagccgaaccgacccgagcgggcggccagagtctttaccgtgctgtgcgaacttcgtaatgaatcgccagaagagattgctcaggcgctgcgcgaaaatacccatcgtctctttaatctcaatgtctccccctcaatgatgtgatgttatttaaataacatttacactcggcaatattggcgttttataactctaatttgtgatttttgccgtagtctctcctaaaaatgttatttaaataacatgtcgcggtggggtaaaatcctctcatgaagcgcgttacccgcatcagcgattgtcatgattcgggtatacacttttactctatgcccgaaaggtgggtatacggctataacgtgatctgaatctcatttttttgagtaacgttgcaatcaaatttcattttgtgtgaaatactgcacaccataaatggcgtaaacctgttcaaattatcccaacaggtgacggattgccccggctgtgtgcccagttttgacggcctgtcagaattgaaaattgttggagagtgttatgactgatttactcgcagcggcgcagcgcgcactgaatctgatggatttaaccaccctgaacgaagacgataccgacgcgaaggtgattgctctgtgtcagcaggcgaaaagcccggcgggcaatacggcggctatctgtatctatccacggtttattcccgttgcgcgcaaagcgctgcgcgagcaaggcacgccggacgtacgcattgcgaccgtgaccaacttcccgcacggcaatgacgatatcgagattgcgctggccgagacacgtgcggcgattgcctacggcgcagacgaagtcgacgtggtcttcccttaccgtgccttgatagccggtaacgagcaggtgggtgcagagctggtaaaagtgtgcgcagaggcctgtcatgacgccaacattctgctgaaagtgatcgtcgaaaccggtgagctcaagcaggaatcactgatccgcaaagcttccgagattgccatcaaggcgggggcagactttatcaagacctcaaccggcaaggtgcctgaaaatgcgaccctgcgcagcgctgagctgatgctgaacgtcatcaaagacatgaacgttgccgagtccgttggttttaaacctgccggcggcgtgaaaaccgcagaagacgccgcgcagtatctggcgctggctgacaatattttgggccgtgaatgggccgatgcccgccacttccgctttggcgcctccagcctgttggcgagcctgctgaccacgcttggccatcagggacagaagtccggcagcggctactgataacccctgcgaggcggcggcgcgttgctgcatgcctcgttttttactgctgatattgtgctgtcctctctgtatccaaactggggtgtgaacgtggcttctgtacaaaaaacctttctggctcaggaaattattcgcaagaaacgtgacggacaaccgttaagtgaagaagaaattcgtttctttattaatggtgttcgcgacagcaaggtttctgaaggtcaaattgccgcgctggcaatgactatctatttcaatgatatgaacatggatgaacgcgtagcgctaactatggcgatgcgcgattccggcacagtgttgaactggaagcctctggcgcttaacgggccgattgtcgataagcactctaccggcggcgtgggtgatgttacctcgctgatgctcgggccgatggttgccgcctgcggtggctatgtgccgatgatttcgggtcgtggtctgggccacaccggcggtacgctcgacaaactcgagagtattccaggattcgacattttccccgacgatgagcgcttcagaaagattattcaggacgtcggtatcgcgattataggacagaccagctcgctggcgcctgccgataaacgcttctatgcgacccgcgatatcaccgcgacggtagattcgattccgctgatcaccgcctctattctggcgaagaagctggctgaggggttggatgcgctggtcatggacgttaaagttggctccggcgcgtttatgccgaccttcgaactgtcgcaggatctggcgcaggcgattgttgacgtcgccaacggcgcaggttgcaaaaccaccgctctgctgaccgacatgaatcaggtgctggcctccagcgcaggcaacgcggtagaagtgcgtgaagcggtccgcttcctgaccggtgaataccgtagcccgcgtctattcgaggtgaccatggcgctgagcgtcgagatgctgctttcctcgggattagcgcaggacgacgcggatgctcgccgtaaacttcaggcggtgctcgacaacggccgtgcggcggaagtctttggtaaaatggtggcggcgcagaaaggtccgacagactttgtagaaaattatgaccgctatctgcctcaggcgaccctgagcaagagggtgtattcagaaaggaccgggattgttacctcaatggacacccgcgccctgggtatgagcgttgtggcacttggcggcggacgtcgccgtgccagcgacgctatcgattacagcgttgggttaacccatatggcgcgcctcggccagcaggttgatactcagcagcctctggcaatgatccacgccaacagtgaagaagcctggcaacaggctgccgatgcggtacgttcggccatcgtgttgagcgacgaggcgccagagacgctgccggtggtttatcgccgtattagctgacggcgttggcccggttaacccattcaccaaaagcggcggccgtgctgccgcttgcaacgcgtattaatgcgcaggagagcaaaatgaaacgtacatttatcatggtgttggactcatttggaataggcgccagtgaagacgccgaacgctttggtgacgtgggttcggacacgctgggccacatcgccgaggcctgtgccagcggcaaagccaacgtaggccgtaaaggtccgctgcatttacccaatctgaccgcgttaggtctggcgaaagccgccgaagcctcaagcggccatttcccggctgggttggacgctaatgcagagataatcggcgcgtatgcctacgccaaagaactgtcttccggcaaagatacgccgtcaggccactgggaaatcgccggtgtgccggtattgtttgactggggctacttctcagacgagaccaatagcttcccgcaggagctgctcgacaagctggttgagcgcgctaatctaccggggtatctcggtaactgccactcttccggtaccgttgtgctggacgcactgggcgaagaacacatgaaaaccggcaagccgattttctacacctccgctgactcggtattccagattgcctgtcacgaagagacttttggcctcgaccgcctgtatgagctgtgtgaaatcgctcgtgaagagctgaccgaaggcggctacaacattggccgcgtcattgcgcgcccgtttgtgggtgacaaggccgggcacttcgagcgtaccggtaaccgccacgacctcgcggtagaaccgcctgcgccgaccatcctgaaaaagctggtcgacgagaagcagggcgaggtggtttccgtcggtaagattgccgatatttatgcccacgtcggcattaccaaaaaagtcaaagccaccggtctggacgcactgtttgatgctacggttaaagagatgaaggctgctggcgatcggactatcgtcttcaccaacttcgttgattttgactcagcctatggccaccgtcgcgacgtaccgggttatgcggctgcattggagctttttgaccgccgcctgcctgaactgctggagctggtcaaagaagatgacatcattattctgaccgctgaccatggctgtgaccctacctggcgcggcaccgatcatactcgcgagcacatcccggtattgatctatggtccaaaagtgaagcccggcttccttggcgcgcgtgatacctttgccgatatcggacaaactgttgccagctactttgacctgtcaccaatggaatacggaaaatccatgctttaaggcggattttttgcgaaacttctattttatatcccatgattataaggaatgttatttatggcaacgccacacattaatgcagaaatgggcgatttcgcagacgtagtcctgatgcctggcgatccgctgcgcgctaaacatattgccgaaacgttcctggaagatatcaagcaggtcaacgacgttcgcggcatgctgggctttaccggcacctacaaaggccgcaaaatttcagtaatgggccacggtatgggcatcccatcctgctcgatttatgccaaagagctgattaccgagttcggcgtgaagaaaatcatccgtgtaggctcctgtggcgcagtgcgtgaagacgtaaaactgcgcgacgtggtgatcggcatgggtgcctgcaccgactctaaagttaaccgtatgcgtttcaaagaccatgactacgcggcaattgccgactacgacatggtgcgcaatgcggcagacgcggcggcggcaaaaggcatcaatgctcgcgttggcaacatcttctccgctgacctgttctacaccccagatccgcagatgttcgacgtgatggaaaaatacggcattctgggcgttgagatggaagcagcaggtatctacggcgttgctgccgagtttggtgccaaggcgctggctatctgtactgtttctgaccacattcgcagcggcgagcagaccacggcggccgagcgtcagacaaccttcaacgacatgattgagatagcgctggaatccgtactgctgggcgataaagcctaagctttcagcggattgaaggcataaaaaaacggaggcccaagagcctccgttttcattgataaccctgcgattatctcttgccgcttctattgattaaccgtcttgcctgcgtcttactctttgtccttatcttcttctttctgctcgcggctgcgctgcaaatttcggtaggcggcctgtacggcctcgagttcggcttcttcttccggcgttaaggtcggcttatcctctatgcgctcctcggcgatggcaatcaccagcggctcattgttatgctccggcaggtcatcgtcttcatcgcgctccttcaggcgcgtactggcggtcaacaggaacggcgactgttcccagcggctgcgtcgaccctgcaacagcgtacgggccagaataatgccgatagccagcgctagcagcatcatcaggcgcagcaagttggtggtgttatcgacctgcttggcctcggttgccagcacgtgggtgtcgagcgtcatgcgcagaaacccgctcgggccgtccttatcaccaataggttgtacaatctggtggttgaaatagctgcctgcgcgcttaccgtcgagcgccagcctgtcgcgcaccggcactgtctcacctgaatgggctatcaacgaaccatcgagttggtaaacgctggcatcaagtatgcgactgtgatcggtaagttgatttaaaatggtggtaatctgcgcgatatccgcgccatcattctgactgtccatcaggggagccagagagaatgccacctggcgagcgagcgtttgtgtcagctgctcgacctgttgagatcgcgctaactggtggcctaggctaaaataggacgcaccttgcatcaatagaactaataaagctaagcaaatcagcacaataaccgtgcggtgtctgcgaagtttcagtttggcctctgccattctgtttccttaaggtattcgacgactttaatgttgccagaagcgttagcgatagggtagcttgatgcgtcgttttatcgcggcccctctgctatttgctcttacaggagaaatcatgccaaaccgtctgacctattgcgatcttccttccgagatccaccaatggccgggacttccactttcactcagcggtgacgaagtgatgccgctcgattaccgggcagggcacacaggctggctcctgtacagtagaaagctcaataaaatcagcatcagtcagtttcagagccgccttggtcgtgcgttagtggtcgtcagtgcctggatggtcgaggactatcaggtcgtgcgcctggccggtccgttaacgccggacgttttcgagctggctgaaaactttgaattcgacattactccgctgcgtaaggttccgcacatgcgtaccccgggcctgctggtcatggacatggattctactgcaatcgagatcgaatgcatcgatgaaattgccaaactggccggcgtcggcgagcaggtggctgaagtcaccgaacgcgccatgcgcggcgagctggatttttccgccagtctgcgtcagcgcgtcggcacgctgaaagatgccgatgccaatattctgctgaaagtgcgcgaaacgctgcctttcatgccgggtctcagggttatggttgcccgcctgcaggaactgggttggcacgtcgccatcgcctccggcggcttcacctactacgccaactaccttcgcgacgagctggacctggttgccgccgtggcaaacgagctggaaatctatgacggcaagctgaccggtgaagtgattggccctatcgtcgacgcacagcataaagccgacacgctgctggcgctggccgaaaaactcggcattccgaaagagcaaaccgtggctatcggtgacggcgctaatgatctgaagatgatgtcggtcgcagggttgggtatcgcctaccacgccaagccgaaagtctacgaacaggccgaagtctgcattcgtcatgccgacctgattggcctgctttgcattctcagcggcagcgtagcgtaatttgaacaacggggcgtttgcgccccaaaaaagaggtatgttgtggcaaaagcagcaaaacgcgcgtttgtgtgtaatgaatgcggcgcagattatccgcgctggcaggggcaatgcagtgcctgtcaggcctggaactccattaccgaagtccgtttggctgcttctcctaccgtcgcacgcaacgaacgtctcacgggctatgccggtgatgcgggcgttagccgcgtgcagaaactgtcggaaatcagcctcgacgagaccccacgctttagcaccggtttcaaagagtttgaccgcgtactgggggcggcgtggtgccgggcagtgctatccttatcggcggtaatcccggagccggtaaaagtacgctgctgctgcaaattctctgcaagcttggcgaaaacatgaagacgctgtacgtcaccggcgaggagtcgctccagcaggtggcgatgcgcgcgcaccgtctcggcctgccgaccgccagcatgaacatgctgtcagaaaccagcatcgagcaaatctgcctgattgccgatcaggagcagccgaagctgatggtgatcgactccattcaggtgatgcacatggcggatatccagtcttcaccggggaccgtagcgcaggtgcgtgaaagcgcggcctatctgacccgctatgccaaaacgcgtggcgtggcgatcgtgatggtcggccacgtcactaaagacggctcgctggccggcccgaaagtgcttgagcactgcatcgactgttcggtgctgctcgacggtgacgccgattcgcgattccgcaccctacgcagccacaagaaccgctttggcgcggtcaacgagcttggcgttttcgctatgaccgaacaggggctgcgtgaagtgaataacccatcggccatcttcctcagtcgcggtgacgagataacctcgggcagctcggtgatggtgctgtgggaaggaacccgaccgctgctggttgagattcaggcgctggtggaccattcgatgatgggcaatccacggcgcgtggcggtggggcttgagcagaaccgactggcgattctgctggcggtgctgcatcgtcacggtggcctgcagatggcggatcaggacgtatttgtcaacgtggtgggcggtgtgaaagtcaccgagaccagtgccgaccttgcgctgctgctctctctggtatcgagcctgcgagataggcctttgccgcaggatctggtggtgtttggcgaggtgggactggcgggagaaatccgtccggtgccaagcggtcaggagcgcattaccgaggccgcgaagcacggcttcaagcgcgctatcgtgccacacgccaacgtgccgaagaaggtgcctgagggaatgaaagtgtttggcgttaaaaaactggccgacgctctggcaattctggacgacctctaatcaacacaaggacccgctatgccgcagtttgattatcttaaggcagcgattaagcaacagggatgtacgctgcagcaggtggctgaagccagcggaatgaccaagggttatctcagccagttgttgaatgacaagattaaaagccccagtgctcaaaagctggaggcgttgcaccgttttctggatctggaatttcctcgtcgcgagaagaagattggcgtagtgttcggcaagttttatccgctgcataccggccatatttatttgattcagcgagcctgtagtcaggtcgatgagttgcacatcatcctcggctatgatgagccgcgtgaccgtgagctgtttgagaacagttcaatgtcacagcagccgacgctcagcgatcgtctgcgctggctgctgcaaaccttcaagtatcagaaaaatattcatattcatgcatttaacgaagaaggcatggagccatacccgcacggctgggacgtgtggagtcaggggattacggcctttatgctgcaaaaaggcattcaccccaacaccatctattccagcgaagagaacgatgcaccgcgttatcgcgagcatctgggcattgatacggtgcttatcgatccgaaacgttcgtttatgaagatcagcggatcgcagattcgccgcgacccgttccgttactgggactatatcccgactgaggtgaagccgtttttcgtgcgcaccgtggcggtgctgggcggggagtcgagcggcaagtcgacgttggtcaataagcttgccaacatctttaacactaccagtgcctgggaatacggtcgcgaatatattttctcgcatcttggcggtgacgagatggcgctacagtattccgactatgacaaaattgcgttgggtcaggcacagtatattgactttgccgttaaatatgccaataaagtggcctttatcgatactgactttttgaccacgcaggcgttctgcaaaaaatacgagggccgcgagcatccgtttgtacaggcgctggtggacgaataccgtttcgacctggttattctgctcgagaataatacgccctgggtcgccgacggcctgcgcagtctcggtagctcgctggatcgcgccgagtttcaaaccatgctgattgagatgatggagaaaaataatatcgccttcacccatgtcacatcgtctgattacgatcaacgttttctggactgcgtcgagctggttcagaagatgctgggcgatgaaggctcaactatcggttcgtaatttctttcgtaacaaaggaatagataataatattcctttgttatttacagagtgaatatactgtttctcttagtcgagaatattctctatccgcagtagatatttctattttaaatagccttcatattattcatcttttaataatgctaccttatttcatatcaacagcctttgtatttaattatttttaattcaaagtgttattttattttattatcctctggtagcaatatgaaattcaatcctgtattacaagtgatgttgttattaactgcatcatttacctccttatattcccatgcggtagtcatgaatcacccgacttttattaaaaacggcggcgatgttaataatattcctaatactcttgaaatggcttacggccccctgcgagaaaaagcgttatccgcacgttttgacgcggtaggtaaaatttatgcctgtacggctacctggttgggcgacagcaaagacggcaagaagagctatattttaacgggtgcccactgtgccgactggaaagaacccaccgccgcgaaggggccttacgtgggtcaattcaaggataaaaacggcaaggttatcgccgaggatggggtgtattattccgggccataccgtataaatccgccggaagaaatgggcggcaacggcagcgatatcgctatgctggtactgaacaaaaaagccgacatgcttgatagcaaagggcaacctgtgagtcagccgtggatctatgacggcagtgaagaaataaataataccgtcaatttcctgggctatggcaactggggtaccggcgatgtgtccgcaaacggtcagtcaccgcaggacgacttcgcgccgcaggaaggctctaaacgcgctgctggcgaaagcgttatcgatgaactctttgcgatggattacgccctgagtgcgccttaccatccgaatcaagactccaaagcctgggcacgcctcgcgccgggcgacagcggcagcgcctggtggcagcatcaccgtggattctggagcatcgtcggtgtcaccaagggcggctcaatgacctcttctcacgccgttcgcgtcgctaaatatgcgcagtggattaagagcgtatatccgcaggttcgcacctttaccagcatgaccaccgtcgatgctacgcatgagctgaaattgcctgacctgtcgcatgaggcgaaggacagctccgtgagttataccgttccgaagcagtcggcggcgaccggtccgacggacgcagactgggatttaggtcagggtcacagcattattcaacttaacctgcgcgatgtgaaccaaggttattatcatcaggtcaatatccgcgcctggcgcgacgttggctgtgccaaagcgccgatgaacagtgcggtgagctgcggtcagaatcagagttcgctggtgctgaaatttatgagtgaggacaatgaatctctgccagccgggcactatcaaggcgtattcactgtctcggcgcaaggctggaatgacaaagcttataccaacaccttgacgcttcacgcggatatcaggattactgatgaggaaacgtctaatcctgagcctgaatatccaaattaccagcgcggacatgcttataaagcgggtgatattgtgacggcgagaaacggcaaactttatcagtgtaaaggcttcccctataccgcttactgcggttacaaaagcgcggcctacgaacccggtaagggcgtagcggcgtatcttgcatggaaagcgttacgttaaatccagcgaataaaaaaagccatcaacgatcgacgtcgttggtggctttttgtcgtcctggcccgcaaagcggacggcctcagccaacggcgtgcaggaagtaggatcgcgggctcatgctcatagagagcacttctttgaccagcttgtcgataccggccttcgcttcaataaggctggttgccaccatataagcgggcgtggtcaccagactgtttttcacgtccactaccgtttcatcatacgacgtgcgtttatgtacagcgcccatgctctcgagaatttcgatagtgtcgcggtcattgcctatggtcagttctacgccttcaccataaatcagcggggccagtactggcgcaatcgaaaggtatccagccggcttgttctcatctttgaaactgttgagaacctctaacgtctcgctgtggatatcgcagtcgggacctttgaacgcaaagtcagagaggttgatggcaacaccggcaccgcccagtacgataacggcgctgaattcgcgactgtggcattcggcaacggctttaatttcgccgcgaaccatccttgccgcctcaaccagcacgtttctttcctgatgcgacacttcaccggtaatgtgattaattatatggtgatgcagcatatcgggcgcaaagcattgataagtcacctgactgctctcgagcgccagaagggtcagcacgacttcattgacatcggcaccgtcatatacgccgcagccggaaagaataaccgctacttttttgccattcatcaacagtccctctttttatcaatgtgctgagaacattatttttgttcaaaaataatggccctttgtgatctgtattaaggatgtcggttttatttaatttaaaaccctgcgctttgtgaagagggtcactttgcggggcagataaaacgccgtcgcaaaaaaaggccgcacgagggcagccttggggaaaatgcacagtcactatttagaacgtcacgatttagaaagctaccacaactttgccctgcatatggccgtcgagcaccttgtcatgcgccgcctgaatgcttgcgacagaaagacccgtcagcgtatcggtcagggtggtttttaccttgccggcgtcaaccaaatcggccacctgctgcaggattttaccctgctcgccgatgtccggcgtggtgtacatgctgcgggtgaacatgaattcccagtgcagcgaggcgcttttcagcttgagctggttttgatcaagcggcttgctgttctcgacgatagtgcagattttgccgagcggggcgataagcttgccaatcgcttcccagtggccgtcggtatcattcaggcagaagatgtaatcgacctgtttgatatcatgttttgcaagttctccgactaaatcctggtagttcacggtcaggtccgcgccacgctcgatgcaccaggccgctgactctgggcgagaggcggtcgcgatcactttgactttgctacgttgggcggcgaaggggatagccagcgaacctacgccaccggcaccgccaacgatcagtagggttttatcggcatcggcgtcctgaatgtgcagatgctcgaacagaccttcccaggcagtcagcgcggtcaacggcatcgccgctgcttccgcccagtttaacgaggtcggctttttcgccacgatgcggtagtcgatcagctgctcgctggcgttgctgcccgaacgggtaatatcgcccgcataccaaacttcgtcgccaatgctgaatccgctcgcgcttttgcccacggccttcacgacgccgcttgcatcccagcccaatactttgggggcttcgaggccgtttttaaccgccctttgtgaactttggtatctaccgggttgatggagacggctttaatctcaaccagcaggtcattttcacccacttctggctgcggtagctcgagggcaataaactgctggggatttttagggtcaacggcaatcgctttaatagtcatgatgtcactccaataaggtgtctgggttttcttcaataacaccagtgtagcggccgagagccaagctgataagatggacaataattaacaaagtgttcgtctgaggtgaacaattgtgtttaagcaactgcaggatatggcgctgtttgcgctggtggccgaaaccggcagcttcacgctggcggcgaaaagggccggtttgcctaagtcgagcgtgagtcagcgcgttagccagcttgagcagggactggggatgcggctgttgaatcgcaccacgcggcaattgaacctgacctttgccggagaacgttatctggtgcactgtcaggagatgctgttggccagcgagcgcgccgagctggcgattctgcgcctcaaggataaccccagtggacgcctgcgcatcaccagcccggccgggttaggtgccacgctgctagcgaggatgaacgccgagttttcgaaacgttatcccgacgtctcgcttgaggtctcggtgtcggatcagttgattgatttggtacaggaaggcttcgacgttgcgctcaggagcggtaaaccgcaggactcatcgttgattggtcgctcgctcggtgaagggccgcgctacctgctggccgcaccagactatctcgctcagcatccgcctctcaccttgcctcagcagttggagacgcacagctgtatcggccatcaggcatggaaggagtggatcctgcgccgcagtgacagctatcaccgctgggtgctgccgcccgcacatcacaccgataacctgctgtatgcacgggaatgtgcgattgccggggcagggatcacgctgctgcctgcctttatgtgccgcgaagaagtgcgtaaggggctgttggtgagagtgctgcccgagtgggaggcggagagcaattcgctgtatctggtctatccgagccgtaagctcaattcgcctgcgttggcctgttttatcgattttatgctcaacgactacgcctttgcagaacactaccagacgccgctgtaggcaataaaaaacccggactgactgcgtccgggtttgtatataggtatctgattacataaagattatttagcgatcttcttgtacttgatacggcgtggttccagggcatcggcgcccagggtacgcttcttgtattcttcgtattcggtaaagttaccttcgaagaattcaactttgccttcatcctgatagtcgaggatgtgggtcgcgatacggtcgaggaaccaacggtcgtgggaaataaccatcgcacagcccgggaactccagcagggcgttttccagcgcgcgcagggtttcgatatccaggtcgttggtcggttcatcgagcagcagcatgttgccgccaacctgtagcagcttggccaggtgcagacgaccgcgctcaccaccggacagttcgccaacgcgtttgccctgatcgacgcctttaaagttaaagcggccaacgtaggcgcggcttggcatttcggtagtaccgatacgcatgatgtcctgaccgccggaaacttcttcccacacggttttgctgttgtccattgcatcacggaactgatcgacagaggccagcttgacggtttcgcccagctcgatgttaccgccggtcggctgttcctgacctgacatcatacggaacagggtcgatttacccgcaccgttagggccgatgatgccgacgatggcgcctttcggtaccgagaaggacagatcgtcaatcagaatgcggtcaccgtaagccttgctcaggttagtgacttcaacaactttgtcacccaggcgcggacctggtggaatgaacagttcgttggtttcgttacgtttctggtattcggtgttgttcagctcttcgaagcgtgccagacgcgccttgcctttagactgttggcctttggcacctttgcgcacccattccagctctttctcgatagacttgcgacgcgcggcttcggaagaggcttcctgtgccagacgttcgtctttctgctcaagccaggaagagtagttgccttcccatggaataccttcaccacggtcaagttcaaggatccagcccgcgacgttatcgaggaagtaacggtcgtgggtgatagccactacggtaccttcgaagtcgtggaggaagcgttccagccaggctacggattcggcatccaggtggttggtaggttcgtcgagcagcagcatttccggcttttcgagcagaaggcggcacagggccacgcggcgacgctcaccacccgacaggttggcaatttttgcgtcccagtccggcaggcgcagtgcatcggcggcacgctcgagctgtgcgttcaggttatggccatcgtgcgcttgaataatctcttccagcttaccctgttcagcggccagcttgtcgaagtcggcgtctgggtctgcgtacagcgcgtacacttcgtccagacgtttcagtgctccaaccacttcagcgacggcttcttcaaccgattcgcgaacggtctgctccagattaagcttaggttcctgcggcagataaccgattttcaggcctggctgtgggcgtgcttcaccttcgatgtcggtatcaataccggccatgatgcgcagcagcgttgacttacctgcaccgttaaggccgagaacgccgatttttgcacccgggaagaaactcagggagatgttcttaaggatatgacgctttggcgggacgactttgccaaggcgatgcatgctgtatacgtattgagccacgttgttttgagcctcttgcttgcaggccggttgctgtaaacaggtcaggttgacgctgtgcgcactccggcagattgaattcagccgcgcctgactgcggcaagactgatagttgttctgactgcgaagtttagcctgtttcagcctaactctcacccccagagccaaatagatctgcgcaagattttggtactggctcagcaggtttgcctccacggccaattcggccaggcgtctacgctgtcgggcatcgagcaggtcagcaagcttgcccgcgccttcgcggtagcgtacttcatacagatattccgattggcggctcagcgcaagtatacgttgccgcgtttgctgttctgcctttaaggtttcgtgcctggaaaggctgtcgtcaacttcgcgcattgcctggtacagcgtctgactaaacagcaggcttttttgctcgaagacattctgtgccgtctctatttgcagattcatttttcgccattcaacgaacggcagggagaggcctgcgcccaaggcacccattgggttgctcagtaatttgcccaacagcgcgctgctggtgccgagcgtggcggtcaagctgagcgaaggataatagtcgagccgtttaatgtctttctggttcaatgtgttacgcaagcgaagctcctgtgcctttacgtcggggcggttttgcagcacggcggcggagatgcctgaattcaccgtagggagatggcgataagccagcggtgtgggttcttcaatgacggtgccgggcggtgcaccgagcagtaacgtctgcagattgacgacctggtcgcgttcattctgcaactgcaccaggacgttttgctgctccagcaatccccgctgcgcgtcgagtgtgtcgagctgagcggttttgcctgcggcaaagcgtacattcgccagctgtagggttttctccgcgtattcaatctcttgatgcgcaatgctcaggcgcctattcagagaagcgcgctgccagtaatattggctggcggtggcaagaagagacaggcgcgcggcccgcaggtcctgctcgctggcctgtttctcccattctgtagcgtctttttggcgcgcgatttttccccacaggtccagttcatagccggtcgccaggcggacgctgctgcttttagcggtactttcggaccgagaaagtgcccgcgtcgttccggtcgtgaggccaagctgcagtttctctacctgagaaataccggtctcctgcgccgccagtctggcttgataaagccgcagcgcggctaatgcgagatcgggattacttttctgcacccgcgcaatccagcgctcaaggcgaggatcgtgaaaatcatgccaggcaaaaatagcgggtaaagcctgacctgactcaaccgattgccactgaggagggtagtgcacgaccggaggcgtgaactcgcttttgacccacgtgccgcagccgacgagcaggcaggctatcgacaggaaacagactcgaagggacagtttcatcatttattcgcttgccagcgaaatgactggatccatccgtgcggctttgtgagccggcagatagccgaaaatcattccaatgagggtcgagcagcagaaggcaatcgccgctgtctgccatgagaaaatcgcgttcaacgcgccgttgcccaaggtattaaacagcgggccaaccgccagcgacagcgcaatgcccaacaccccaccggtgatgcaaaccagcaccgcctcgacaataaactgctgcatgatgtcactgcgacgtgcgccaacggccatccgcacgccaatctcatgagtgcgttcggtgacggagactaacatgatattcatgaccccgaggctgccgatggtcagcgagatggcggcaaccatcaggataagcaggctgaatattgtcgaggtgcgttctcgtgatttacggtattggtcctgattgaaaatcatgaagtccttggccccgtggcgctggacaagcagccgttttatggcctctactgccgccacgctgtcggcgctgtctttaagttttacgctgatactgccgagggtctgctgcgcggacatgcgctgaaataccgtggaataggggatccagacgtagctggcgttcggcggcgcgtgtttatagctcgacgcgacgccgactattctcaccggcaggacgccgagataaataacctgtcccaacgggtcctgacggtccttcgggaacaggatattacgcaggttttcgtcaataacgccttcctgtaacgcgctgcgatcgttttgaaaaacggtgccctgtaaaatttctattccgttgatacgaaaataatcgcgccccacgccggtcaccgtgcttgaggccgtttgctggcggaaaacaacctgtttggtgtcggaaatttcggggctgacgccgtcgacatcgttgagggcggcgatggcttcggcatccgtcactctgagaaccggatttaccagcggcccagtgcgataaaagttgtcgcccggaaagagagtaatgacgtttgcgccaagcccctcaatttcttccagcgttttctgtttagcgccttcgcccagtgcggcgacggtcaccacggcggcaatgccgaaaatgatgcccgccatggtcagcagggttcgcagtcgatgcgcattcatggcttttagggccatcagcagggcgttctgcgctcgttcgaggcttctcagccaatggctttgccgttcagaggtttttttcggcagggtggccggattcggcgcatgtttgccggtatcagacaccacctctccgtcgcgcagggtgataacccgctgtgcctgacgcgccacgttgatgtcgtgggtaacgataatgaccgtatggccgagttggtgcagctcgttaaggatctggagtacttcctgcccagaggtcgagtcgagcgcgccggtcggttcatcggccagaataatttctccgccgttgataagcgcccggcaaatgctgacccgctgctgttgcccacccgagagctgacccgggcggtgatgctcgcgtcctgccagaccaagacgtgacagcagggcactggcgcgctcacggcggttaatgcgtgagacgttggcataaattgccgggatctcgacgttggcgagcgcgctgatatccggcatcaggtgatagcgctggaagataaaacctatgtgctcgcggcgcagggcggcgagtgcatcagcggagagttgggcggtgttttgcccgtcgatgtaaagctcgccagacgtggcgacatccagacagccgatgatgttcatcagcgtggatttgccggaacccgaggtgcccatgatagccaccatttcaccggcggcgacctcgagcgtgatgttgttaagcacggtgattgaagaggtcccgctggcgaagacgcgagagacgcctttaagcgcgatgagggcttgctcagaggttgtcactggtaaattaccgcgtcgtcttcggacgtctgtctcactagcccggcgtttagtaccactacctcacctattttaagcccctgagtgatttcgatatccacgctgttggtgatgccggtctgcacgtcgcgccgttctttttggccatttttgttgagcacctcgacctgttgcagcttatcgttgaccctggtaaccgctcgcgcggggatcagcagcacattcttcgcctcctgcaagggcagcgtgacctgcgcagtcatggcgatgcgcagccgattctcgggattgggcacgtcgagcagtgcgttgtaatacaccgaaccgttggccgcagcggataccgggcttgcctgtccgctactctcttgtttcataatggattctggcgcaagctcaatcacgcgcagctgggcatcgtaacgtttgccaggctcggcgaaggtcgagaaataggccttctgcccttgacggacacgggtgatatctgcctctgagatctgcaccttgatggtcatcacgtcgagttgggcgagtttcacgacggtcggcgcattctggctggcgttcagggtctggccctgctgcgcgacaatggcgatgacgatgccttttttcggcgccagtactttggtgtagctcagatccagcttctttttgtcgacctcgatttgcgcctgcactaattgggactcaatcgctacccgctctgcgcgggtcatcttgagagccatgtcggcgttctccagttcttcacgcgagctggcctgctggctcagcatgcgtttttgacgaataaactgggcgttggcctgagcaagctgtgcctgcttggcttttttgttcgcgcggatgacgttgagcgcggcttcggcgttgcgtaagttgttacgctgttgcagggagtcgatttcggccagcaactggcccttgacgacggcgtctcccattttgacctttagagaggtgacctcaccggtgacctgtgcaccgacgtcaacgcgctcgaacgcgtcgagcttgccggtggcgagcacggcgttctcgatgtcgccgcgcttcaccttagcggtaacatactcaggttcggtggccttcaatcccccgctcaccccataaatgccgagggccgcagccgataaaagcattaaaatgagcaaggtttttaacggcctgttgctcgcttttttcatcatattcaatatgttaatccggctattttttaatcactcggcgatgataacttttggcctgtatccgagaacttaattctccttatttcaggaattaatcaggttttagggcaggccaccctgagagtcggcctgagtaaggtggcgagatatcggggtgttcttcaaactgtgtaaagtttgcggcgtgggaagggcatttcttcatttcttggggcgaatagattagcgtatacaatgtctatcaatgacgactgtgcatttttgtcatcagggcctattttttatgggcaagcagtcagcaacacaaccagcgaggataaaggtaagtatggtcaaggcggacaagtggcgatttttgacggtgggactgttgttagtgtcggcagcgggcgcagcccacgctgactctctggatgcacagcgccagcgttacatgcagatcaagcaggcctgggatgccaatcagctcgacgttgtgagccagctgatgcccactctgacagattatcctttatatccttatctggaataccgccagctaacgcaggatattgccctggtgacgccgcagcagattacggccttcgtcaaggccaaccccacactgccgcctgcgcgttcgctgcctgcgcgctttgtcaacgaactggcgaggcgtcaggactggcaggggctgctctccttcagcccgcaggcgccgcggccggttgccgcacgctgcaactactatttcgccaagtggtctaccggccaacagcaggtcgcattcgatggcgctaaagatatctggttgaccggcacctcgctgccgggcacctgcgataagcttttcaccgtatggcaacaagccggtaatcagaccgcgctgacgacgctacagcgcatcgctctggcgatgaaggcgggtaatagcagcctagtgacctatctcgccaaacagctgccgtcggactaccagacgatgagtgacgcgctggtggcactgcaaaacgatcccaataccgtcgaaagctttgcgcgtaccgttggaccgaccgactttacccgcaatgccgtgagcatcgcctttgcccgcgttgcgcgtgacaacgccgataatgcacgctcgatgctgcctatcctggcgcggctgcaaaaaatggacgatggcgatcgcctcggtctggaagagaccgttgcctggcagtatatgggcagcgatgcgacgccagaacaggccgcgtggcgcgacaacgtcatccttcgcagtcactccacctcgctggttgaacgccgcattcgtatgtctctggctgccggtgaccgtcaggggctggcgcgctggatgcagcagcttccagcggacgcgatgcaggaagatgaatggcgctactggcacgccgcgctgctcatcgatcaaggccgtcgtaccgagggtgaaagcattctacgcaccctgatgcagggccgtggtttctatccgatggcggcggcacaaaagctcaatgtcgcttatcccatgaccatttccgtggccgcaaggcctgacgctagcctggataagtcgccggagatagcccgcgtgcgcgagctactctattggaatatggataatctggcgcgcactgaatggacgtatctggtgcagagccgcagtaaaacacagcaggaggcactggcccgttacgcctacgagaaaggctggcccgagctgagtgtgcaggccactatcgccggtaaactgtgggattatttgcaggagcgcttcccactggcctggtcaccggaattccgccaggcaactgaaaataaaggcattactcagagctacgcgatggcgattgcccgtcaggaaagcgcctggaatccggcggcacgttcgccggtcggtgccgcaggcctgatgcaattaatgcctgccacggcggagcatacggtgcagatgagcggtattcctggctataccaacagcagccagctgcttgatccgcaaaccaatatcaccattggtaccgggtatttggaatatgtctatcagatgtttggccgcaaccgtatcttgtcgagtgccgcctataatgcgggtccgggccgagtgaatacctggctgggcaataccgaaggacgcgtggacgccgtcgcatttatagaaagtattcctttctctgaaactcgccgatatgttaaaaatgtgttagcgtatgatgcgttttatcgctactttttacatcagccagccaaagtcttaaccgacgcggagtggcagaggcgttattgatctttgcgccactatggtatgctgctgtactagtttaatagtgtggcagcgtatccatggcacaaatttctttgaatgacccggctctttcccaacaaggcaatgaggactggcaatgctttctggcattgctacagcaatcttttgctgaaaatctgcaaaattccctgcttcagctttttcttacgcccgacgagcgcactgcgctgggaacgcgtttgaggatcattgaagaattgatgaggggagagttgagtcagcgcgaactcaaaaaccagctgggtgcgggtattgcaacgattacgcgaggctcaaatgggctgaaatccgcaccgcctgagctcaaggcctggctggcggcgcgtttactagaatcagcggacgacgacacaacgcagtcgtagcctgcgcaggcagacgttagtgcgtctgtgaacgtgtctggtaaatcgcattatggaagggcgcaagggccaacaccagcgcctgatgatacacgctagtacgcgttagcttcccggcggtaaagataccaatcgctcccccttgcgtttaacttcggcaatgcccgagagtttttccatttcgtcgcccaattcactcccctgacctatctcctgtaatataatttcaggcaacatcaggctggcagagcgcgattcgccgcgttgatgcatgttttcaatcaccatccacgcgaaagtcatgttgtcttcgattccagcttctatcccgacccagaaatccgcctcggggcggatttggcgtgcgctgatgacgcgatgtcgtgcacccgtacgggtttcgagactgccaataggctgttcgggaacgccgctgtcgacgtcgatgccttcaatgcggaaagaatcggcaccgaaaatgtcctcaaaagccatggcaattgcgttaatttttgctgggttggtcgtagcagcgataacgtgatacatagatttcattgtccttagcttatttcacgcagtataacggaaaaaactcatgttacaggtatatctcgtccgtcatggcgaaaccgaatggaatgcagcacgccgtattcagggacagtctgacagcccgttgaccgaaaaaggggtctttcaggcacagcaagtcgccgaaagggtgcgcaatgagggtatcacacatgtgattgccagcgatctaggacgcacgaaacgtacagcagaaattatcgccgatgcctgtggttgtgaagtcattacggacccgcgcctgcgtgaactgcatatgggcgtgctggaaactcgtcatctcgacggcctgacgccgcaggaagagacatggcgcaagcagatggtcgatggcacgccggagggacgtattccgcaaggcgagaccatgaacgagctggcgtcgcgtatgcgtcaggcactcgacgactgcctgaatctgccggaaggcagcaagccgttgctggtgagtcacggtattgcgttgggctgtcttatcagcactattctgggactgccgccgtacgccgagcgtcgtttgcgtttgcgtaactgttctatctcacgcgtcgatcatcagcaaagtgcgtggttggcgtcaggatggattgttgaaacggcaggcgatattgcgcatctggatcagcccgcgttagacgaattacagcgttaatctcataacgagctggtatagcgaataaacaggcgcaggcaggaggatgaatcctgtcgcgtctgattacttttagcggcggatagggatgaggtaatcacaatccatttctttcggcggctcggttcccatggttttacgcattggatggaaacgctcgatgtcctgacctttacgacgggtaagtttcagcgtcggcaggcaggtggtgtacagcgtcaggataaactcctgaagcccttccggtgaacctttgaagcggaacatggcgtattcaccttcgttgagcacaatttcttttccttccggcatattgtcggtcagatggcttggctcaatggcggtggtatacatcacttcctgctcgtcatctttttcctggcttggtcttgaatgatgaagaccataaagaagtggcggtaattctgttgtttcaccaatgtactgacgccagaaatggtcccgcatttcattacggtaggttgtaatttgttccagcgtacaggaatagctctgcgtcacgccaatcagatgtttttccggcatagagataaactccggctgcggaagaatgaaagcacctaaacggatgggtggacaaattccgaaagagtgccaatcttcagagcgacgatacagtgcaggtgtttgtgcaaattgttttttgaaagcccgggtgaaagtctgctgagagtcaaaacggtattgcagggcaatatcgagaattggccgactggtcagacgcagtgctactgcagctttagaaagcctgcgagcccgaatgtaagcaccaatagcattattcgtgacatccttgaacatacgctgcaggtgccatttagagtagcctgcttttgctgcaacgttgtcgagtgataacggctggtcaaggtgtgtttctaaccagctgagaagatcacgaatgattcctgcttgatccatagatcatcctcgttgaacttatataggcgcgtagtaatttaacccgtgcatgatagcaattttttaacgttaaaactcgcagatattttttagcatactgtgcgattttggagaaattatggcttaatcattttcactttgtgagccagcgcaagatgttacagtggtaggattagtttatcagtcaactaaatgacttggggtaactcgatgaaaaattgtttaatttttgtacttggagtgttgtcgctatgttccgcagcggcacaggcggagcagattggctctgtggataccgtgtttaaactctttggaccggaccataaaattgtggtcgaagctttcgacgatccggatgttaaaaatgtaacctgttatatcagtcgtgccaagacgggcggcattaaaggcggccttggattagctgaagatacctctgacgcagccatctcctgtcagcagattggtccggtcgaggtgtctgacgacatcaagaagggcggtgacaagggaaccgtggttttcaaacagagaacgtctttgatattcaaaaagctgcaggtcgtgcgtttctatgatccaaaacgaaatgcgctggtttatctgagctattccgacaaagtggtcgacggttcgccgaagaacgccatcagcgcagtgccgattatcccatggggtaatcgctaagcaactgtcgctcacgctacgtaaaagaaaaggccagctttcgctggcctttttaactgttacagaccggttggcaacccgagtgttaacgattcaactcattgatagataatctatttcccaacgcgacgatgcggctggggcaacgatcactcttccaggtcgccgcagaagcgataaccttcaccgtgaatagtggcgatgatctctggggtatccggcgtcgcttcgaaatgcttacggatgcgacggattgtgacgtcaacggtacggtcatgaggcttcagctcacggccggtcattttcttcagcaaatcgccacgggtctggatcttgcccggattttcgcagaagtgcagcatcgcgcggaattcactgcgcggcagcttgtactgttcgcccgccgggctaaccagtgaacggctgttgatgtccagctcccaaccgttaaaacgatagctctcaaccagacgacgctcttcacccaccgggctcagattcatggtacgggtcaacaggttacgcgcacggatggtcaattcacgtgggttgaacggcttggtcatgtaatcatcggcaccaatttccaggccaaggattttatcgacttcgttatcgcggccggtcaggaacatcagcgcgacgttagcctgttcacgcagttcacgcgccagcaacaggccattttttcccggcaggttgatatccatcaccaccaggttgatattgttttcggacagtacgtgatgcatctcggcaccatcgttggcttcaaaaacctcgtagccttctgcttcaaaaatactttttagcgtattacgtgttactaattcgtcttcgacgataagaatttgggggtctgcatttttgctacctaagattgccaacaaatagaaaataggagtacagaagtccttgttatacagatgaatttgacagtttcttgtcgggtttcactcgtgacatgactaaagtacgtaaacgcgttcttggtacactttccatcaacggcaacaacatcgcctgctcagttgggataccacttcctgcagtcccgttggtaccttgagcggcgcatatcctaaccctattaacagcaatataacagcgagtaccgaaactgccactcaacaaaactacgctttgttgacatatatcaatttcaattgtagcacggtaacagaaaggtgaaaaatacttaaaatccggcacccagcacttacatttcggcgtttattaaaaaatatttgatagataaataacgttaagtttcaaaaaatttaacaactagtctcactttgcttatcattatgatttttaatggtaattaatcagtcgtttgcgcggcatggctattcaatgtcagccgagcacgccgaaggcttttttccttagccaacaccaagacatattcgaagactgttaaacggatgtgaattataattgtgcctattccgattgtctgttgccttaaataaactcgaacggcgacctactgatcttctttaatcgtcatttttcagaggtagctcatgcaacttcatattattctcgtttccccggctcggcccgaaaatgtgggcgcagcggcgcgggcaatgaaaaccatgggcttcgcctcgctgcgtatcgtcgacagtcaggctcatttgcagccggaggcgggctgggtggcccatggttccgctgaaattctgcaaaatgcacagcactttgccaccctcgaagcggcactggccgacgttgatttcacgattgcgaccactgcgcgcagccgggcaaaattccactattactgcacgccgcaggaacttgagacccaactggccgaacgccagaactgggtcaataacgttgcgctggtgtttggtcgcgaggattcgggcctaactaatgaagagctcgagttggccgatctgctgaccggcgtgccgatggttgccgattatccgtcgctcaacctcgggcaggcggtgatggtattctgttatcagctctcttcgttaaaccaaatagcacaaaagcaggcgattcaggccgaggcggggcaactgaatgcgctgcgcgatcgcgtctcgcgtttgttagttaatttgggctctcaggatgaccagaaattgacggattggctgcaccagagactcggcgttctggagcaacgcgatgccgccatgctgcacacgttgctgcacgatatcgaaaaaaaattcggccactgaggtcggacgctttttaaagaacagcaagtggaatgtctatcctttatgcagaatgctggtttttttatctaaaaattgcctaaaagactggtttaatccgctgcattcactgtgtgcattttttaggcgaaaaatagaaaaaaattgacttaccgaggcttatgctttagctaatagggcagacagagtaaaaactaactagataaagacaacaaaaaccaatgcgacacatcagcctgaacaccacaattattacaaccaccaccattaccatcggtaacggggcgggctgacgcgtacaggaaaaacagaaaaagcccgcacctaaccagtgcgggctttttttttacggctacattccctagtaaaatttctcgacaagagagtaggagaaaccagaaatgcgagtgttgaaatttggcgggacgtcagtagcaaatgccgagcgcttcctgcgggtagcggaaatcatggagagcaatgcaagccagggacaggtcgctacggtattgtcagccccggccaaaattaccaatcatctggtcgcgatgatcgaaaaaaccgttgccgggcaggacatcctgccgatcgtaagcgatgcagaacgcattttttccgacctgattaacggccttgccgaggcgctccctgcctttgacctggtcggcatcaaacgttttgtcgagcaggaatttggtcagctcaaacagctgctgcacggtatcggcctgttgggacagtgcccggacagcgtcaacgccagcatcatctgccggggtgaaaagctgtcgattgccattatggaagccgtattcaaagccaaaggtttcggtgtgaccgtgattaatccggtcgagaaactgctggccgtgggccactacctcgaatctaccgtcgatatcaacgagtctaccgcccgtattgctgcgagcaacattcctgccagcgatatcgtgctaatggccggtttcaccgccggtaatgacaggggcgagctggtggtgctgggacgtaacggctccgactactccgctgccgtgctggccgcctgcctgcgcgcagactgctgcgagatctggaccgacgtcgacggcgtttacacctgcgatccgcgcactgtgccggacgctcgcctgttgaagtcgatgtcttaccaggaggcgatggagctctcgtactttggtgccaaggtcctgcacccgcgcactatcacacctatcgcccagttccagatcccatgtctcatcaaaaacaccgccaatccgcaagcaccgggtacgctcatcggcagccacagtgcgggcagcgaatttgaagacaaaaataccccggtcaaaggcatcaccaacctgaacaatatggcgatgatcaacgtctccggtccggggatgaaaggcatgattggcatggccgcccgcgtgttcgcggtgatgtcgcgttcgggtatctcggtggtgttgattacccaatcttcttccgaatacagcatcagcttttgcgtgccgcagggagagctggttcgtgcccgtaaggcgctggaagacgagttttacctggagctgaaagacggcctgcttgagccgctcgacgtgaccgaaaagctggccgtcatctcggtggtaggcgacggtatgcgcacgctgcgtggtatctccgccaagttcttctcggcgctggcgcgtgccaatatcaatatcgtagccatcgcgcagggctcgtcagagcgttctatttccgtggtcgtcagcaatgacgatgcgaccatgggcgtacgcgtcagtcaccagatgctgttcaataccgatcaggtcatcgaagtgttcctgattggcgtcggcggcgtcggcggtgcgttgatcgaacaaatccgtcgtcagcaggcgtggctgaaggccaagcacatcgatctgcgcgtgtgcggtatcgccaactcgcgcgcgatgctgaccaacgtgcacggcattccgctggaaaactggcgcgacgagctgggcgcggccaaagagccgttcaacatcggtcgtctgattcgtctggtcaaagagtaccacctgctcaatccggtggtggttgactgtacttcaagcgaggccattgctaaccagtacgccgatctgctgtccgacggtttccacgtggttacgccgaacaagcgcgccaatactgcgtcgatgaactactaccatcagctgcgtaaggcggcggcgagctctcgtcgcaagttcctgtacgacactaacgtcggtgcgggcctgccggttatcgaaaacttgcaaaacctgcttaatgccggtgacgagatggtgcgcttcagcgggatcctctccggatcgctgtcgcagatcttcggcaagctggacgagggcgtgtcgctgtctgaggcgacgctggcggcgcgtgaaagtggttttactgagccggatccgcgtgacgatctctcgggtatggacgtcgcgcgtaaactgttgatcctggcgcgtgaggccggttacaaacttgagctgtctgacattgaagtcgagccagttctgccggtatcctttgacgcgaccggtgacgtcagcgcgttccttgcacgcctgcctgagctcgacgccgagttcaaaaaacgcgtggccgatgcggccgcagaaggcaaggtgctgcgttacgtcggcgccatagatgaagggcgctgtagcgtcaggatcgaagccgtcgacggtaacagtccactgtataaagtgaaaaatggcgagaatgcgctggcgttctacagccgttattatcaaccgattcctctagttttgcgcggctacggtgcgggtaacgatgttactgccgctggcgtcttcgccgaccttttgcgaacgctgtcatggaagttaggagtttaatatggttaaggtatatgccccggcatcaattggtaacgttagcgtcggttttgacgtgctgggtgcggcagtttcaccggtagacggttcgctactgggcgactgcgtgagcgtggaagcggcctcgcaattcagcctcaagaatgaagggcgcttcgtgtccaagctgccggacaagatggaagacaacattgtttaccagtgctgggaacgctactgccaggaagtgggcaaagaaatcccggtcgccatgacgcttgagaaaaacatgcccatcggctcagggctgggttccagcgcctgttccgtggtagcgggtttgatggcgatgaacgagttcaacggcaaccaggtgagcgatacccgcatgctggagctcatgggcgagctggaaggccgcatctccggtggcgtgcacttcgacaacgttgcgccatgctatctcggcggcctgcagttgatcattgaagagctgggcattgtgtctcaggacgtgccttgcttcgacgactggctgtgggtgatggcgtatccgggcatcaaggtgtctaccgccgaggcgcgcgcgattttgccggcccagtatcgccgtcaggactgcatcagccacggtcgttatttgtccggtttcattcacgcctgccatactcagcagccgcagctggcagttaaactgatgaaagacgtcattgccgaaccttatcgcacccgtttgctgccgggctttgctcaggcgcgaaccgctgctgaagaaataggggctctggcctgcgggatctcgggatccggtccaacgctgtttgctatctgtaacgacagcgagacggcgcaacgcatggctgattggctgcagaatcactatctgcaaaatgacgaaggttttgttcatatttgtcgcctggataccgcaggcgcgagactattgggataatcgatgaaactgtacaacctgaaggatcacaacgagcaggtcagctttgcacaagcagtgaagcaaggcttaggcaagcaacaagggctgttcttcccgctggatctgcctgagtttgagctgaccgaaattgaccgcctgctcgagctggatttcgtaacgcgcagcagccgcattctttctgcgttcattggcgacgaaattcctgaagaagcgctgtatcaacgcgtgaaaaatgccttcgccttccctgcaccggttgctgcggtcgcagacgacgtagcctgcctggaactgttccacggcccgacgctggcatttaaagacttcggcggccgctttatggcgcagatcctgactcaagtgtcaggcgatcagccggtgaccattctgaccgcaacctccggtgataccggtgcggcagtggctcacgccttccatggcctgaaaaacgtgcgcgtcgttatcctatatccgcgcggtaaaatcagcccgctgcaggaaaaactgttctgtacgctgggtgacaacatccacaccgtggctatcgacggcgatttcgacgcctgccaggcgctggtcaagcaggcgttcgatgatgaagaactgaaggttgcgctgcaccttaactccgcgaactccatcaacatcagccgtctgctggcgcagatctgctactactttgaagctgtggcgcagctgccgcaggaagcacgcaaccagctggtcgtttccgtacccagcggtaacttcggtgacctgacggcgggactgctggcgaaggcactgggtctgccaatcaaacgctttatcgcggcgaccaacgccaacgacaccgtgccacgcttcctggtcaacggcgagtgggcaccgaacaagacggtggcaacattgtcgaacgcgatggacgttagccagcctaacaactggccacgagtcgaagaactgtatcgtcgcaagatctggcagttgaaggatctgggctacgcggcagtgagcgacgagacgaccgaagacgccatgcgcgagctggcagacatcggttacatctccgagccgcatgcggcgattgcttatcgtgcactgcgtgaccagctgaaagaaggggagttcggtctgtttatcggtacggcacacccggcgaaatttaaggaaagcgttgatgccatcctcggtcaggagctgccgttgccgaaagagttggccgaccgcgccgacctgccgctgctgtcgcacaacttgcctgcggacttcagcgaaatgcgtaagtttctgatggctttgcctgaataaacgcaatgcaaaaaacgaaaaggccatcatttgatggcctttttactgcgctgaagcaggtcaagctacgctcccgtcattttgtaaaacgagttggagggtaaagcgttacttctgctctgctcgcgtaaataccagctcgttgccttcggagcgcgcggcgtcgaaccgataaccctcgagcgagaacgcctgtagctgcttacgctgggtcaaacgctccttgatgataaagcggctcatcagcccgcgcgcttttttggcatagaagctgatcactttatacttgccgttcttctcgtcgaggaacaccggtttgattatctcaccgtccagcttcgccgttttcaccgccttgaagtactcgtccgacgcaagattcaccagaatgttatctccttgttctttaaggatagtattcagtttctcggtcagcaggtcaccccagaaagcataaagattagtcccctgcggattgttgaggcgaatacccatctcaagacggtaaggctgcatcaggtccagaggacgcagaataccgtacaggccggagagcatacgcaaatgcttctgtgcaaaatcgaaatctttctcgctgaagtcttccgcctgtaggccggtataaacgtccccttaaatgccaggatagcctgacgcgcattgtccggcgtaaagtccggctgccagtcgttaaaacgctcggcgttaaggtgtgccagcttgtcgctgattcccatcaggctggaaatctccgccggagaaagctttctggcaatctcaatcagctggctggatttatcgagcagctctggctgagtgaagcgtttggtcgcaagtttactttcgtagtccagcgttttggcgggtgaaataatagtcagcatagcggcgtccggttagtctgcgcagtgttgagcaggaaagtgaataatacagtctttagttattttaccaaaaaaccgctgctttaaaaaaatcgcagcaataggctccgccttgagcctgattatttccagatgccgtcctgcaattgccccttcagctcaggaaaactgccggagttaaacaccggttcgcggcccatgactcgctggcgttcgaagtctctcaccaccttcagcgccagccctgagagcaaaagcagggcggtcaggttgatcatggtgatcaccgccagagagatgctggccgtctgcatcagcaacggcgttccaataaaggatcccaccagcagcatcaccagcatcgccagccgcagcaggtagagagagccggttttgccacgctgcaaaaacagcaggttattttcggcatacatgcagttggtcatcatggtcgtaaagccaaatatcaacatgaatatcgccagcaactgtggaccgaacgaacctatgcttccgctcacggcctgcgtgaggagggtgataccgctgattttgtcggtcggcgcagtgagcatgcccgacgagagtattatcatggcggtcgcgctgcataccacgaaggtgtcaaccagtacgcccagcatctgagtgaagccttgattggccggatgacgtgacgcggccatggcggcaatgtgcggcgttgaacctgaccccgcctcgttggagaacaggccctgctgaataccctgagtcatggcaatggtcacgccatagccgagcgcaccggcggcaaattcctgaaagccaaaggcgcttttaaaaatgagcagaaacacttccggcagcctgtcgacgttgaccgccatcacccagaaggccagtagcatatagctaaggcacataatcggcgccagccatacggaaaccttcaccagcgtgcgcagcccgcccgcgagcgttagcgcgaaaagaatgcccagcgcaatgctgatgtgccaaggcgtcaaattaaaggccaccgccaccgcctgggtgacggctttggcctgtagaacgttgaacacgaagccgacgatgaggatcatcaataccgagaatagcacccccatccagcgcatgccgaggccacggctcatgtattcggaaggtccaccgcgaaactgcatcttgttatcggtggtcttaaacacctgcgcgagggtgttttctatcagtgcgatcggcataccgagcagggtgattatccacatccagaatatcgcccccggaccgccggtggtgatggccatcgccaccccggtcagactgcctacgccgatgcggccggaaagggtcacggccagtgactggaacgacgaaacgccgcgtgcatcggcggatttattgcgtcgcaggcaaagaaacatttctcgccagcgtcgaaactggatgaatcgcgtgcgcaacgtgaggtaaataccgaatcctaaaaggaaatagatcagtattgattcccacagaatgtcgtcgagaaagttaagcaagctggccatcagagtccttattccttaaaaaatatatggctaatcctttattcttcgcccgttttttaaccatttattgcattaataatcaacttttattgcataaaacaatgagcactataactgccttgcggatgtcttggcgcatgttatcatcaagagaaggcaaggcatgaaaatgcctcaacgataatctacaaacgatgagatatgccacaatgaccgataaattgacttccctacgcgaactgaccaaggtagttgcagatactggtgatatcgcggcaataaagttgtatcagcctcaggatgccaccactaacccttctttgatccttaacgctgcccagatccctgaataccgcaaactgatcgacgaagccattgcatgggcgcgcgaccagagcagcgatcgtgaccagcagatcattgatactgccgacaagcttgcagtaaatatcggtcttgaaattctgaaactggtgccgggccgtatttctaccgaagttgacgctcgcctgtcttacgacaccgaagccagcatcgcgaaagctcatcgtttgatcaaactctacaacgatgcaggcatcagcaacgaccgtatcctgattaaactggcttctacctggcagggcatccgtgccgccgagcagctggaaaaagaaggcatcaactgtaacctgaccctgctgttctccttcgctcaggcgcgtgcctgtgccgaagcgggtgctttcctgatttctccgttcgtgggccgtatcctcgactggtataaagctaacggcgacaagaaagagttcgcaccaagcgaagatccgggcgtggtgtccgtgaccgaaatttacgaatactataaacagcatggctatgaaaccgtcgttatgggcgcaagcttccgtaataccgacgaaatcatcgagctggcgggttgtgatcgtctgaccatcggacctgcgctgcttaaagaactgaaagaaagtgaaggtacgctggagcgtaaactgtcttacactggcgaaatcaaagcgcgtccggcgccgctgaccgaagcgcagttctactgggaccacaatcaggatcctatggctatcgacaagctggccgacggtatccgtaagtttgccgtagaccagggcaaactcgaaaaaatgatcgccgacctgctgtaatcgcccgtctggtgacaaacctgaataaagaggtggcttaggccacctttttttatgcctgtcttgcttaaaaaacctcttgtgccctgtggttctggcttaggttgccgatatacttgtcttttactgtggccgccgcgagcggcatgtttcacagagatccaggaggagcgaaatggataaattacgaattggtctggtgtcagtttccgatcgcgcgtcgagcggtatttatcaggataagggcattccggcactggaagcctggctgggagaggcgttaatcaccccgtttagccttgagaaacgcctcattcccgatgagcagcctctgattgagcaggcaatttgcgagctggttgacgaagcgggatgccatctggtgctgaccactggcggtacgggtccagcgcgccgcgacgtgacgccggatgcgactatggccgtggccgatcgcctgatgccgggcttcggtgagcaaatgcgccaaattagcctgcattttgtgccgacggccattttgtcgcgccaggttggcgccattcgcaaacaggcgctgatcctcaatttaccggggcagccgaagtcgattaaggaaacgctggaaggactcaagggtgacgacggtaacgttatcgtgtcaggaatatttgccagtgtaccttattgtatacagctgctggagggccttatatcgaaacccacccggacgtcgtagcagctttccgccccaagagtgcaattcgcgatacaaaaaactgaagttaggctatttctgctataagattcagtgtcagtggtgtgaaaattaattgccgcatatagtaatgtttactttacatagtgcggcaagattttttaccccaactcgatgcgtcaggtatcttatgcaacacgataacaatcgtcggcttaaccggcaggactacaaaacactttctctcgcggccctcggcggcgctctggaattctacgacttcatcattttcgtcttcttcgcggcagttatcggtgacctgttctttccgtcgtctatgcccgactggctgcgtcaggtgcagacctttggcatctttgcggcagggtatctggcgcgtccgctcggcggcattgtgatggctcacttcggtgatttggtcggccgcaagcgtatgttcagcctgagtattctgctgatggcgctcccgactctggcaattggcctgttgccgacctattcctctatcggcattgcggcacctctgttgcttctccttatgcgactgttgcaaggcgcggctattggcggagaagtgccgggtgcatgggtctttgtcgccgaacacgtgccgcgtaaacgcattggctttgcctgcggaacgctgacggccggtctgaccttggggatcctgctgggatcgctggtcgccaccttgattaccacgctgctgcctgccgctgccatcgcgcacggcggttggcgaattccgttctttattggcggtatcttcgggtttatcgcgctgtatctgcgccgctggctacaggagacgcctgtcttcgtcgagatgaaatcgcacaaggtgctctctgaagggctgccaatcaaatcagtcatcgccaatcacaagaaagagattgtggtgtcgatgctgatgacctggctgctgtcggcgtgcattgtggtggttatcctgatgacgccaacgtatctgcaaaaacagttggggattccggctgcgctgactttgcaggccaacagcatggcgacgattgcgctactgttcggctgtatctgtgcggggtgggtggtggaccgcgtggggcgagcaaaacctttatcgtcggcagcctgttcttcggtatttgcagctgggcgttctatcacctggtcgcgctagacagcacctggctcaagccgatgtatacgctggtcggctttagcattggtgtggtggggcggtgccgttcgttatggtgcgggccttcccggccgaagtgcgatttaccgggatctccttctcctacaacctgtcttacgccatctttggcggcctgacgccgatttttgtcacgctgattatgcgcataacgccgatggccccggcctattacgtgctgacactggcggttatcggccttggattaggcgtttatctaaatcgcgatttgaataatgaatcgaagattgaggcccgactggccgaggcgggtcaataagccaccgagtgcgcagtgaatccttgtcgatccactgcgcatcttgttattccccgatcggcagcagcgcgtaaccgtactgctcgttaatgacctcggccatcgccagataaatagcgctggctccgcagaaaatcccttcaatccccgcgatgcgcagcagcatcacgctgccgctcaaattgcccgcggccagcagaataaagagcaacgtcaaactgccaaacacaatttgcagcgcgcgattgtgctttagcgagccgataaacatcagcagcgtgaaacagccccacagcgccagataaacgccgagctgctccgggctacaggcgtcggcaagccccatttttggcagcagcaaaatgccaatcaggctgagccagaacgcaccataggagaggaaagcggtcatcccgaaggtgttgcctttgcggtattccagcagaccggcaaggagctgcgccatcccgccaaagaaaatccccatgctgataatcactgcggtcatcgggaaaacccggcgttatgcagattcagtagaatggtggtcatgccaaagcccatcagcccaaggggaccgggattggcaagtttgcaattttgcatagatgtcctgaaataatcgttgttctgaaataaatgatccccacataggtgaagtctgtggaaaaagaaggtgcgctatctcagcgaaaaattgcggtgattattccgccatgacctgagcgacgggcatcataaagaggggttgttggataaatattgatcttacagggcaattaagacgaaattttttttgttgttgcccttgatgctgagagacatgaccccatcttattctcaaccgcagttgttaccgccggtcttaagcaatatcggacagttgaaaagtaaaaaaccgtccgcatatagagtaacaacctcaacgaataatgaattttagtggagacgttttagatgggtagaattattggaatcgacttgggtaccaccaactcttgtgtagcgatcatggatggcactactgcacgtgtgcttgaaaacgccgaaggggatcgtaccacaccttcaatcattgcttatgcgcaggacggtgagatcctggttggccaacctgctaagcgtcaggccgtcactaacccgcagaacacgctgtttgctatcaagcgtctgatcggtcgtcgcttccaggacgaagaagttcagcgcgataaaggcatcatgccttacagcatcgttggtgctgacaacggtgacgcctggattgacgttaaaggccaaaaaatcgcacctccgcagatctctgcagaagtgttgaagaaaatgaagaaaacggctgaagattacctgggtgagccagtaactgaagcggttatcactgtacctgcatacttcaacgatgctcagcgtcaggcaactaaagacgccggccgtatcgcaggtctggaagtaaaacgtatcatcaacgaaccgactgcggcggcactggcttacggcctggatcgcgaagtcggtaaccgcaccatcgcggtatacgacctgggtggtggtactttcgatatctctatcatcgaaatcgatgaagttgatggcgagaaaacctttgaagttctgtctaccaacggtgacacccacctcggtggtgaagacttcgatagccgtctgatcaactacctggttgaagaattcaagaaagatcaaggtatggatctgcgtaacgatccgctggcaatgcagcgtctgaaagaagcggcagagaaggctaaaatcgagctgtcttctgcacaacagactgacgttaacctgccgtacatcactgctgatggcagcggcccgaaacacatgaacatcaaagtaacccgtgcaaaactggaatctctggttgaagacctggttacccgttctatcgagcctcttaaagtcgctctgaaagacgcaggcctgtctgtttccgacatccaggacgttatcctggttggtggtcagactcgtatgcctatggttcagaagaaagtggctgacttcttcggtaaagaaccacgtaaagacgttaacccggacgaagcggttgctatcggtgctgctgttcagggcggcgtgttgtctggtgatgttaaagacgttctgctgctggacgtgactccactgtccctgggtatcgaaaccatgggcggcgtgatgacgccactgatcaccaagaacaccactatcccgaccaagcacagccaggtgttctctaccgctgaagacaatcagtctgcggtaaccattcacgtggttcagggtgagcgtaagcgttcagccgacaacaaatctctgggtcaattcaacctggacggtattcaggcagcgccacgcggtatggctcagatcgaagtgaccttcgacctggacgccgacggtatcctgcacgtgtctgctaaagacaaaaataccggccgtgagcagaagataaccatcaaggcatcttctggtctgagcgaagaagaaatccagaaaatggttaacgacgcggaagctaacgccgagtcagaccgtaagtttgaagagctggttcagactcgcaaccaggcggaccacctgatccacgggactcgtaagcagctggaagaagccggtgacaaactgccagccgaagacaaaactgctatcgaagacgcgttgaaagcgctggaagttgcagccaaaggcgaagacaaagctgaaatcgaagccaagacccaggctctggttcaggtttccggtaagctgatggaactggctcagcagcagtctcaggctgaaggcggcgacgcgagcgcgaagaaagacgacgacgtagtcgacgctgaattcgaagaagtaaaagataaaaaataatgcccttgaggcaaagtaatcgatacgttcccgaaagtctttgagatacaggtaggcggcaagtgaactcacttcaggagcttacatcggtaagtgactggagtgagtgagcacagccaacatccctatatttcgaaggatgagggggatattgataaccagcacgggcgtcgaggtaactctgcgcccgtgcacgcatgttgagggtagcaaaggcatggcgaagcaagactattatgagattttgggcgtctccaaaacagcggacgagcgcgaaatcaaaaaggcttataagcgcctggcgatgaaacatcaccctgaccgtaatcagggcgataaagattccgaaagcaaatttaaagaaattaaagaagcttatgaaatcctgaccgatgcgcaaaagcgtgcggcctacgatcaatacggtcacgcagcctttgaacaaggcggcatgggtggcggtggtggttacggcggcggtggcggtgcggacttcagcgacatctttggtgacgtctttggcgatatctttggtggcggccgtcgtcaacgcgccagccgtggctcagacctgcgctataacatggacctgactctcgaagaggcggtgcgtggcgtaaccaaagaaattcgtattccaacgctcgaagagtgtgacgtttgccacggcagcggggcgaaagcgggcagcaaacctgtcagctgtccaacctgtcacgggcagggccaggtgcagatgcgtcagggcttctttaccgtacagcaggcgtgtccgacctgtcacggccgcggcaacatcattaaagatccgtgcaccaaatgtcacggtcatggccgcgtagagcgtgctaagactctgtcagtgaagatcccagcgggcgtagatactggcgaccgcatccgtcttgaaggcgaaggcgaagccggcgagcagggagcaccagcaggcgatctttacgttcaggttcaggtcaaggcgcacaagattttcgagcgtgaaggcaacaacctgtactgtgaagtgccgatcaacttcgcgatggcagcactgggcggcgagattgaagtcccaaccctcgacggccgtgtgaagcttaagattccgtccgaaacacagaccggcaagctgttccgcatgcgcggacgcggtgttaaatccgttcgcggcggcgcgcagggtgacctgctttgtcgcgtggtcgtcgagacaccggtcaacctgaacgaaaagcaaaaacagctgcttcgcgatctggaagagagcttcggtggcgcatcgggtgagaaaaacagcccgcgttcaaaaagcttccttgacggggttaaaaagttttttgacgatttgacccgttaagttcttttaaggtttttaacgccttttaaatccccggctgcagagtcggggatttttatttgccgctaacctgagtacactccaatacttatttcgcgccgttatcatcgcgcggacagtgtttcaaaaggagtatataaagtgaccaacctgattcgtcagttcctgcgtatggaagcgtcgggcggaattgtattgattgcggcggcggtcgtcgcacttttaatggcaaacacctcactcagcgacctttacctcgatttcctcaactctccagtatccttcagcgtcggcggcgtcgggctagacaagcccctgctgctgtgggtgaacgacgggctgatggcaattttcttcctgatggtcggtctcgaggtgaagcgtgaactgctggaaggtgcgctttcaagccgtgagcaggcgctgtttcctgcgattgccgcactgggcggcatgatagtgcccgcgcttatctatctgtcgtttaacggtgccgatgaagtggcccgtcaggggtgggcgattccggctgcgaccgacatcgcctttgcgcttggcgtgatggcgttgctgggttctcgtgtgccgactagcctcaaggtgttcctgttggcgcttgccatcatcgatgacctgggcgctatcgttattatcgcagccttcttcagccacgatgtttccgttaccgcgctgatgctgtcggtgctggcgattgcggcgctggcgtggcttaactggcgtggggtcaccaggctgacccttacgttatcctcgggattttcctgtgggtgtgtatcctcaagtcaggcattcacgccacgctggccggggtcattctgggcttcttaatcccgctgcgtaccgaaggcaagacgtcgcctgcgcgtcgcgtagagcacggtattcacccgtgggtcgcctggctgattctgccactgtttgcgtttaccaacgcgggtgtgtcgctacagggcgtgtctggtgaaggcgtgatgtcgctgctgccaatggggattgccgccgggctgctgtttggtaagccgatcggcattatgctgttctgctgggtgtcgatgaagctgaagattacgcgtctgccgccgggcgtgcgttttagtcagattgctgccgtatcggtgctgtgcgggataggcttcaccatgtcgatattcctggcgtcgctggcgtttggcgatgcggatgcgtcgatgatgatctatgccaagattgggattttgttgggttcggtactgtctgcggtgatgggatacctgctgctgagtcgcgcgttgccgaagaaagtgtgatcggcacccgccaaataacagcaataaaaaaaccggcatatgccggtttttttatcaagctctcaacaaaatgcgattattgcattgcgttgatttgcgcagtcaggtttgacttatgacgcgcagctttgtttttgtggatcagacctttacaggactgacggtccacaattggttgcattgcgttgaatgcattttgtgcagcttctttgtcaccagctgcaatagccgcgtgtaccttcttgataaaggtacgcatcattgaacgacggctagcgttatgctgacggcgtttttctgattgtacggcgcgtttcttagctgatttgatgttagccaaggtccaactcccaaatatttttctattgaggacaattcgaaggccgaggaatatgccttttcggacttcttttgtcaacggatttgtgcaaataagcgccgtttctttgctcgaacttcatccgaacttcaagcgacgcttgttacgttgtgatggcgcaggattttaacagctatcagccgcagaatacagcccatcgcaataaaattcagttgagaagtgattattcttccaacagagattgttaatgctgagtttttttgagaaaacagaaaggattggcgaaaacggggtttcaatgaagcctcactgttttacaagcgtcgagtatagagacaatctccggccaagtcgccctgataccaaaaaaaatgcggtatcgatgagagaatcctgcgatcccacgaatcgctggttaaccttatgggctgtacaaggtataatccgccgatttcctctgttttgagccagctatggatttgagcctgttatggagctaattcgcgggatacacaatattcgagcgcgccaccatgggtgcgtactcactattggtaattttgacggtgtacaccgtggccatcaggccttgatcgaacagctgaaactggaaggtcgccgcctgggtttaccggtcatggtaatgatttttgaacctcaacctctggagcttttcgccgcagagaaagccccggcacgcttgaccaacctgcgtgacaaggcaaagtatctcgccgaatgcgggatagactatttgttgtgcgtgaaatttgacccgcgttttgccgcgaacagcgctcaggccttcgtgtctcagctgttggtcgaaaaactgggcgtcaaattcctgaccgtcggtgatgacttccgcttcggcgctgccagactcggcgatttcacgctgctgctaaaggccggtgccgaatacggttttgacatcgtcagcacccagaccttccgcgagggcggtcatcgcatcagcagcaccgccatacgcgacgcgctgcgtgatgacgagctggcgctggcagagaacctgctcggccatcctttcagcatttctggcagggtggtgcacggtgacaagctgggccgcacgattggcttcccgaccgccaacgtcccgctcaaacgcctggtcagcccggttaagggcgtctatgcggttgaggtcatgggcctgggtcctgacccggtccccggcgtggcaaacattggtacccgacctacggtcaacggtgtccgcaagcagttggaagttcacctgcttgacaccacgatagatttatatgggcgccacattgacgtggtactccgcgcaaaattgcgcaatgaacagcgttttgcatcgcttgatgcgttgaagcagcaaattgccaacgacgagcaaacagcccgcgagtttttcgggctgaaactttcttgagcgataacccatttagtagcccggcttctagccgaaaaacggaaccgagaatcttatgagtgactttaagaataccctgaacttgccggaaacagggttcccgatgcgcggcgacttagccaagcgtgaacctgcgatgctggataactggtacaagcaggatctgtatgggattatccgcgcggccaaaaagggcaaaaaaacctttattttgcatgatggccctccgtatgcgaacggcagcattcatattggtcactcggttaacaagattctcaaagacattatcgtcaagtctaaagggatggccggttacgactcgccgtacgttccaggctgggactgccacggtctgcctatcgaactgaaggttgagcagctgatcggcaagccgggcgagaaggtcacgcctgccgaattccgtgctgcctgccgttcctacgctgccgaacagattgaaggtcagaaagctgacttcatccgtctgggcgtgctgggggactgggatcacccataccgcaccatggacttcaaaaccgaagccaatatcatccgtgcgctgggcaaaatcatcagtaacggccacctgctgaaaggcgctaagcctgtgcactggtgtaccgactgtggttcttcgctggccgaagccgaagttgaatactacgacaaaacctctccggctatcgacgtagcgttcaacgccgtcgatccgaccgccgtggcggccaagtttggtgccaccgctttccatggcccggtttctctggttatctggaccacgaccccgtggaccatgccggccaaccgcgctatctctctgaacgccgagttctcctatcagctggtgcaggtagaagaccgttgtctgatcctggctaccgacctggtcgccagcgtgatgaagcgtatcggtgcaaccgagtggaccgtgctgggcgagtgcaagggcgctgaccttgagctgatgcgcttccgccatccgttcctggcgttcgacgtaccggccatcctcggcgatcacgtgacgctcgacgccggtaccggtgccgtacacaccgcaccgggccacggtcctgacgacttcgttatcggccagaaatacggtctggaagtggctaacccggtagggccaaacggctgctacctgccaggcaccttcccggcgctggacggcaaattcgtgttcaaggctaacgacatcatcgttgaaatcctgcgtgagcacgacgcgctggtgcatttcgagaaattcacccacagctatccgtgctgctggcgtcacaaaacgccaatcatcttccgcgccacgccgcagtggttcgtgagcatggatcagcagggtctgcgcgcgcagtctctgaaagagatcaaaggcgtgcagtggatcccggactggggccaggcgcgtatcgaaaacatggtcgcgaaccgtcctgactggtgtatctcccgtcagcgtacctggggcgtgccaatgtctctgttcgtgcacaaagacaccgaagagctgcatccgcgcacgcttgagctgatggaagaagtggccaaacgcgttgagaacgacggcattcaggcttggtgggatctcaaccctgaagacattctgggtgcagacgctgcccactacgtgaaagtgccagacacgctggacgtatggttcgactccggttcaaccagcttctccgtagttgacgcgcgtccagagttccacggtcacgagccggacatgtatctggaaggttccgaccagcaccgcggctggttcatgtcatcactgatgatttctaccgcgatgaaaggccgtgcgccgtacaaacaggttctgacccacggctttaccgtggatggcaacggccgcaagatgtcgaaatctatcggcaacaccgtgagccctcaggacgtgatgaacaaactgggtgccgacatcctgcgtctgtgggtggcctcgaccgactataccggcgaaatcgccgtgtcggacgagatcctcaaacgtgctgccgactcttatcgtcgcatccgtaataccgcgcgcttcctgctggcgaacctcaacggtttcgatccggcgctgcacagcgtgaaaccagaagatatggtggtgctggatcgttgggccgttggccgcgcgaaagccgcacaggaagagatcgttgccgcttacgaccgctatgatttccacggcgtagttcagcgtctgatgcagttctgttccgtcgagatgggttccttctatctggatatcatcaaggaccgtcagtacaccgcgaagagcgacagcgtggcacgccgcagctgtcagaccgcgttgtactacatcgccgaagcgctggttcgctggatggcaccgatcatgtccttcactgctgacgaaatctggtccgttctgccgggggctcgtgagaaattcgtgttcaccgaagagtggtatgacggtctgttcggactggcagagaacgaagccatgaacgacgagttctggtccgagctgctgaaggtgcgtggcgaagtcaacaaggtgcttgagcaggcgcgtgccgacaagcgtttgggcggttcgctcgaagcttccgttacgctgtacgccgatgacgccttggccgctaaacttaacagcctgggcaacgaactgcgcttcgtgctgctgacctccggtgccaaagttgctgcactggccgacgccgacgaaaacgccattccgagcgaactgctgaagggcctaaaaatcggtctggaaaaagcagaaggcgagaagtgcccgcgctgctggcatttcaccaccgacgtcggtcacaatcctgcacatcccgaagtgtgtggccgttgtgcaaccaacatcgccggtgacggtgaagagcgtgaatttgcataatgggtaaaccaatctgttctaccggactccgctggctttggctggcggttgttgtgctggtgctggatctcggcagcaaagtgttggtgatgaatcatttccaactcggcgaatcgctgccgctgatcccgttttttaatctgacctatgcgcataatccaggggcggccttcagcttcctggcggacaaaggcggctggcagcgctggttctttgcggccatcgcactggttatcgtggtggcactgctggtactgatgtaccgcagcagcggcaagcagaagctgaataacattgctttcgcgatgattattggcggcgcgctgggcaacctgttcgatcgcatggttcacggttttgtcatcgactttatcgatttttacgttaaagactggcactacccaatattcaacctggccgacagctttatctgcgtcggcgcagtgttagttgttctggaaggcttcctgtcctcttcagacaaaacggcaaaaagtaagggataagataatgaccgagcaggtgatacacgacagcgcggtgttggttcacttcacgctgaagctggaagatggctccacggcggaatcaacgctcagtcacggcaaacccgctttgttccgactgggcgacggcagcctgtctgacgcgctggaaaacgagctgctgggtctgcgtgtaggtgacaagaaagccttcacactctctccggagtcggcgttcggcaccaaaagccccgatctggttcagttctttcccctgcgcgattttatcgagactggcgtgcccgatgtcggtaccattatgctcttcaccacccgcgacggcagcgaaatgccgggtgtggtgcgtgaagtaacagaaggttcggtgaccgtcgatttcaaccatccgcttgccggacagcatattgattttgatattgaagtattagaaatagaccctgaaatggaggcgtctcatgcaagttctgctggctaacccgcgtggtttttgtgccggagttgaccgtgccattaccatcgtagaacgtgcccttgagctttatggtgcgccaatttatgtgcgccatgaagtggtgcataaccgttacgtggtcgacagcctgcgccagcgtggcgcggtgtttatcgaacagattagcgaagttccagacggttccattctgatcttctccgcgcacggcgtctcgcaggcggttagggccgaggcaaaatctcgtgacctgaccgtgtttgatgcgacctgtccgctggtgaccaaagtccatatggaagtcgcgcgcgccagccgtaagggcacggaggctatcctgattggtcacgccggtcaccctgaggtcgaaggcaccatggggcagtacaataaccctaaaggcggcatgtacctggtcgagtctccggccgatgtgttcaagctggacgtcaaagaccctgaaaatctgtgctttatgacccagaccacgctgtccgttgatgacacttccgaggttatcgacgcgctgcgtgagcgcttcccgaaaatagtggggccgcgtaaagacgacatctgctacgccaccactaaccgtcaggaagccgttcgcaacctgtcggacgaggctgacgtggtgctggttgtcgggtctaaaaactcgtctaactccaaccgcctggccgaactggcacagcgcgtaggtaaaccttcttacctgatcgactctgccgatgatatccaggaagagtgggtgaagggcgcgcttagcgtgggtgtgacggcgggcgcttctgccccggatattctggtacagcaggtgatcgatcgcctgaaaactctcggctgtctgggcgtggtcaacatggacggacgcgaagagaacatcgttttcgaagttcctaaagaactgcgtatcgatatcaaagcggtaggttaagtatttaaaatcttcccccactgaaaagtgggggaagttcagcatagtaaaacggttatattagagcctgaacaggttctgtcccgccctcgtgccgacgttgtcacctgcaacagtgccccttcgatttccccaggattttccagaccggtgcgcgccgacgtaataaacagctgattcatcccggcaccgccaaacgtgcagcagcttggctgcgtgacaggcagcggcagggcatcaagcgtcagcaactctccctgattgatcttctgacgcagcaggcaatggttgccccagcaggcggtcagcagcagcccgtcttcactcagcgcggagccgtccggcgttttgtcgccgggtgagtagcacgacagtttcagcggattaatacgccgcgcgttgcccgaataaaatcgcttccgcacgctgtcggcaaaccacacttttccctcatgccaggccagcgtattgggggtgcctacgttgtccatcatcagcaccggggctgcatcgcccgtttcatagcgataccatccgccgattttgtcttcttctttaatgtccatggtgccaaaccacagagaaccgtcgggcgcgaccgccgcttcattggggcgagtgccttccgcgcccgcatagccacacagcagggaacgcttttcaatcaggtagtcgtaaagcgccaggccgtcctgcgcgaccaagaggaagaggtcctgctggtcggtgagcagtgcggcgctggtcagtgacggaagtgcgcgtgtttcgaaggaagccgtttcaggccaatagcgcagcaggcgttgattaagaatatcgacccacagcagagactgggtacgctggcaccacaccggggtttcgcccaattcggcgcgatagtccgttacggtgactatctcagagcgcaaaaatgctgacatgaacgtttctccagcagaggctaaaaggtatttgtttgatgagtttagccgtgcattgcggccagtggaaagagaaagctgtgcgtagactgacgcagggcataaaaaaagcctgctgaagttttcagcaggctcgaacttctcgatctctttatctgtgtcttgagataaaggggagttattagaagttgtagtacagacgcaccaggttgagatcgccgatcttgtcggtagagttggtgatcatgtgctcgaagtcgacctggaagccgtaatcaagtttcacagccacacccacgccgttgtcggtacgctggtaatcacgtccgctcacatacttcagatggtcacccatgaagtaaggctgcacgctcttgatggcgaattgcttaaccgggatgttgtaaccggcatagtattcgacgccccacgcgttgcctgcgaagtagtcctgatcgttgttcactttggtggtcaggaagttgtgataccagccgccgcctgtagacaaggtccagttgcccggtgtccatgacagagcggtacccagaatgctctggtcgtagtctttagagccgcctgccgcaccccggtttttaacttctgcgctggtgtagttgtatgcgctaccccatgccaggttgtcggtgatgtgccagtttgcaccaacagaaccgccgcctttacgtttgtaggccaggttgttggattcaagcaggtcgtcgtcggagaacaggtaagcggcatagagatcgaccggacctgctgcatatttatatttcagctgcttacgtgaacgatatgaaccgtcgtagtcaccgttgataccgttacccggtgcctgggccaacatgtcgtcatcccaaacgtcggttttcgcgccgacaacatcatagtagatgctgttttgctgaccgtaggtcaaagtaccgtaagtcttgctcttgaaaccggtatacagctgacggcgagtcgtatggtgcgcgccttcagcatagtggtcgtcccagccgaagaccgacggaatgttcacgccgagttcgtagtaactgatccagtgaacgtcgtcaaacaggaagtagtcagcggtgaagcggaaacgtgtgccgccgtcatagccgttatttttgtaggaacctttatctgagccgcccatggtattttggaactgaggacggatgctgccaccgactttaaagtcgagacggctaagcagatcgtaaggctgaggatcctgtttaatcagcgttatttctgcttgtgcagcgaaagatgcgccgcctaaaagtaggccagcaacgactgtttgtgaaaccctattcattttaaatttcataaaaactccaggtgccaatactgtgttggcatcctaattttccctagctatacacgagggggattaacgagcatgtaacagccgtattgcaatccgtctcgttttatcactgactttcattgcgcaacaggctggttcgcttaataatatttaattgctaattcaatggtttaccgatattaaagattggcttatttatcttcctgcctctgcaataatgtttcgacttaaaattagctggctatttattatcataagggttcaataaaatccaataacgaaatatgaattatttatatcaggcttaataaattgatctgcatccgggaaacgtgcaaaaaaagagataatgcctgtgcaggttattcatctgtatgcatgattattcatttaagtgaattgtattgtcttgagggttgttattgctggttttttcagcaatgtcgaaagtgaagggcgaggctttcgacccgacgcgaaataggttttactgatgttagcgtgcctatatcataattttctaattatgaggcaatttcactagccgtgatggaatgggtggttaacctgattctgttttacgaagcacacattaataaagagagaaattatgagcaaagctgatatccgcatggcgattgccggttccggtgggcgcatgggtcgccagctgattcaggccgtacagcaggctgaaggtgtggttctgggcgcggcgttagagcgtaaaggttcttcacttgtgggtactgacgcaggcgaactcgccggtgtaggcgcgattaacgttaaagtcagtgacagtctggaagcggtagccggtgattttgacatcctgatcgatttcacacgccccgaagggactctcgagcacctgagcttctgtctgaaacagggtaaaggcatcgttatcggcactacggggttcgatgatgcaggtaaagcggcaattaaacaggctgccgatgaaattcccgtcgttttcgccgcgaactttagcgtaggcgtcaacgtggtgctaaagctgcttgagaaagcggcaaaagtgatgggtgactacaccgatatagaaatcgttgaagcacaccatcgtcacaaggtcgatgcaccttcaggtactgcgctcgctatgggcgaagccatcgcgggtgcgctaggccgtgatctgaaggactgcgccgtctatgcccgcgaaggccataccggtgagcgtgacccgatgagcatcggtttcgccaccattcgcgccggggatatcgtcggtgaacatactgcgatgtttgctgatattggcgagcgtgtagagataacgcacaaggcctcaagccgcatgactttcgccaatggcgcagttcgtgctgctaaatgggtatcactcaagaaaaatggtctctttgacatgacagatgtcttgggtctcgaagatttataaggttctccaacaatcgtgatgtggttgtttttatcataagtttttgatggaagggcagttattttattgcccttttcttttgtcttaaaaatagcgccttcagttgctttttaattccaagttaccttttgttggcatttacccggttttttctaccgttttgaacataaagtagccgctcaatttctcttcattcgattatagtaaacaaaataacgattttttcagataaccccgctcgcaaacgtttactatgcttacttatcctatccttttatcgctatttgacgttcatttcgctgagtgatgcgaaaaacacaaaaataatggcgctttgggtagacaaaccccacgcccatcattagaatgcgcgcaatttgccaaaaattagcttttagggtagaaaaataaccgctctgagtgcaatttttgcattgattaggtcattcgatctgaattaatatgcaaatataatgattgattattcttggaggatgctttgataaagtcagcgctattggttctggaagacggaacccaattccacggtcgggccatcggggcagagggaacggcagtaggggaagtggtcttcaatacgtcgatgaccggttatcaagaaatcctcactgatccttcctattcccgccagatcgttactcttacttatccccatatcggcaatgtcggcactaacgccgctgatgaagaatcctctgcagtacacgcccaaggcctggtgattcgcgatctccctctgattgccagcaactaccgtaatgaagaaaacctgtctgactacctcaaacgccacaatatcgttgctatcgccgatattgatacgcgtaagttgacacgtttactgagtgaaaagggcgcgcagaacggctgcatcattgccggtgataacgtagatgctgcgttggcactcgagaaagccaaaggcttcccgggcctgaaaggaatggatttagcgaaagaagtcaccactcaggagtcttacagctggcagcaaggtagctggactctggagggcgatttgcctgaagcgaagaaagctgaggatttacctttccacgttgtggcctatgactacggcgtgaagcgcaacattctgcgcatgctggttgaccgcggttgccgcctgacggtggttccggcgaaaacctctgctgcagacgtgatgaagctcaatccagacggcattttcctgtcaaacggcccgggtgaccctgagccatgcgactacgccattgaggctatcaagaccttcctgaccactgacattccggtgttcggtatctgtctgggccatcagctgttggcattagccagcggtgccaagacgcttaaaatgaaattcggccatcacggcggcaaccatccggttaaaaatcttgataacaacaccgtgatgatcaccgcgcagaaccacggttttgccgtagatgaagccagcctgccagccacgctgcgcacgacgcacaaatcactgttcgacggttcattgcagggtatccatcgtaccgacaagccagcgttcagcttccagggtcaccctgaagcgagtccgggcccgcacgatgcagccccactgttcgatcactttatcgaactgatcgaagcctaccgtaacagcggcaaataattaacaggagcagataatgccaaaacgtacagacataaaaagcattctgattctgggcgcgggtccgatcgtaatcggacaggcctgcgagtttgactactctggtgcacaggcgtgtaaagccctgcgcgaagagggctaccgcgtcattctggtgaactctaacccagccaccattatgaccgacccagacatggccgatgccacctatatcgagccaatccactgggaagttgttcgcaagattatcgaaaaagagcgtccagacgcggtactgccaacgatgggcggccagactgcactgaactgtgcgctggagcttgagcgtcagggcgtactggaagagttcggcgtgaccatgattggtgcaaccgccgacgcgattgacaaggcagaagaccgccgtcgctttgatatcgcgatgaagaaaatcggtctgggcacggcacgttcaggtattgcacacaatatggaagaagcgctggttatcgctgccgacgttggcttcccgtgcatcatccgtccttcctttaccatgggcggcaccggcggcggtatcgcttacaatcacgaagagttcgaagagatttgtactcgtggtctcgacctctccccaaccaaagagctgctgattgatgaatcgctgatcggttggaaagagtacgagatggaagtggtccgcgacaagaacgacaactgcattatcgtttgttctatcgagaacttcgacgcgatgggtatccacaccggtgactccatcaccgtggcccctgcgcagacactgaccgacaaagaataccaaatcatgcgtaacgcctctctggcggtactgcgtgaaatcggcgtcgagactggcggttcaaacgtacagttctctgtgaatccgaaagacggccgtctgatagttatcgagatgaacccacgcgtatcacgctcttctgcgctggcttctaaggcaaccggcttcccgattgctaaagtagccgccaagctggcggtgggttacacccttgacgagttgatgaacgacatcaccggcggcaagaccccagcgtcattcgagccttcaatcgactacgttgtgactaaaattcctcgcttcaacttcgagaaatttgccggtgccaacgaccgtctgaccacccagatgaaatctgtgggtgaagtcatggctatcggtcgcaccttccaggaatcgatgcagaaagcgctgcgcggtctggaagtgggcgcaagcggcttcgaccctaaagtgagcctcgacgatcctgaagcactgaccaaaatccgtcgtgaactgaaagaagccggttctgaccgtatctggttcatcgccgatgcattccgtgccggtatgtccgtagacggcatctttaacctgactaacatcgaccgctggttcctggtacagattgaagagctgatcaaactggaatctcaggttgctcagggcggctttagcgcactgaactacgatttgctgcgcgtgctcaagcgtaaaggcttcgccgacctgcgtctggcgaaactggtcggcgtctctgagagcgaaatgcgcaagctgcgtcacaagctgaacctgcacccggtttacaagcgcgttgatacctgtgcggctgagttctcgaccgacaccgcctacatgtactccacctatgaagaagagtgtgagtccaacccaactaacggcaccccgaaaattatggtgctgggtggcggtccaaaccgtatcggtcagggtatcgaattcgactactgctgcgttcacgcctcactggcgctgcgcgaagacggttacgaaaccatcatggttaactgtaaccctgaaaccgtttctaccgactatgacacctcagaccgtctgtactttgagtcggtaacactggaagacgtgctggaaatcgtccgcatcgagcagccaaaaggtgtgatcgtgcagtacggtggccagactccgctgaaactggctcgcgagctggaagcctgcggcgtgccgattattggtaccagccctgacgcgattgaccgtgcagaagaccgcgaacgtttccagcaggcggttaaccgtctgggcctgaagcagccagcgaacgccaccgtagccaccatcgaacaggcggtagagaaggcagctggtatcggttatccgctggtggtgcgtccatcttatgtgctgggtggccgcgcgatggaaatcgtttatgacgaaatcgacctgcgccgttacttccagaacgcggtgagcgtatccaacgatgcgccagtgctgctcgaccgcttcctcgacgatgcgatagaagttgacgttgacgcaatctgcgacggcgagcgcgtgctgattggcggcatcatggagcacatcgagcaggcgggcgttcactccggtgactccgcatgttcactgcctgcttataccctgagcaaagaaattcaggacgtaatgcgtcaacaggttgagaagctggcgtttgagctttccgttcgtggcctgatgaacgtgcagtttgcggtgaaagacaacgaggtttacctgattgaggttaacccacgtgctgcgcgtaccgtgccgtttgtttccaaggcaaccggcgtggcactggcgaaagtggcggcacgcgtgatggcgggtcagacactggccgagcagggcgtcaccgaagaagttatcccgccgtactactcggttaaagaagtggtgctgccgtttaacaaattcccgggcgttgaccccatcctcggcccagagatgcgctctaccggtgaagtgatgggcgttggccgcagcttcgctgaagccttcgctaaggcccagctgggtagcctgtctgggatgaagaaagctggtcgtgcgctgctgtccgttcgtgacggtgacaaggcgcgcgtggttgatttggccgccaagctgcagaaacacggctttgagctggacgcgacacacggcaccgccgtcgtactgggcgaagcaggcatcaacctgcgcctggtcaacaaggtgcatgaaggtcgtccacacatccaggaccgcatcaaaaacggtgaatacagctacatcgtcaacaccaccgcgggccgtcaggcgattgaagactccaagctaattcgtcgcagcgcgctgcagtataaagtgcactacgacactacgctgaacgggggttttgctaccgccatggcgctgtcttcagacccaaccgagcaagtgatttccgtacaggaaatgcacgcaaaaattaaaggctaatcaaggcttttagcctcggttgttgtcttgtaacgtaagaagggcgcagcattatgctgtgcccttcttttttgttttttattgttttattaagaacccattaacggtttttttttcctctggcacaaagttgcgtatgctcaataaaatacgtttttatatggaagctttatgatcctgattatctacgcccatccttatcccggcattcccatgccaataagcatctgcttcaggaaattaaggatctccctgatgtaaaaatcagatctctttacgatctttatcctgacttctctattgatatcaaagcagaacagcaggcgatggaagaagccgatctggtggttttccagcatcctctacagtggtacggtctgccgccgctgcttaagctgtggatcgacaaagtgctcgagcacggctgggcctatggccatgatggcgatgccctgaaaggtaaaggctgcctgtgggcggtgactaccggcggtaacgagcagcatttccaactggggagttatcctgatttcgctgcactcgcccagcctattgaagcaacggcactgtactgcggcatgaaatggcagccctactttgcgctgcacaatacctttacctgtaacgaggtgacgctgaaggcgggcggcgaggcgtatcgccagcggttgctcgactggcaagcggcacatcccgcgtcgttagcttcggcagaacaggctcagtcattggagggggaagcgaatggataatcacagcatgatgatcgaggggcttatctatctcggatcggccgcgctgtttgtgcctattgccgtgcgtttcggactcggctcggtgctggggtatctgattgccggctgtatcattggcccatggggcctgaagctggtctcggacgccgaatcgattctaaccttcgccgagattggcgtggtgctgatgctgtttatcatcggtctcgaactcgaccctaaacgcctctggaccctgcgtgcctcggtcttcggcggcggcagtattcagatggtcggctgcggactggtgctcagcgccttctgcgctgcgctgggactggactggaaaattgcgctattgattggcctgacgctggcgctctcctcgacggcgattgccatgcaggcgatgagcgaacgcagcctgacgccaacgcctattggccgcagcgcctttgcagtgctgctgtttcaggatatcgcggctatcccgctggtggcgatgattccccttttggccagcaccggtgaaaccaccacgctggcgtccttcggcatttcggctgccaaggttgtcggcgcgttagccatcgtggtgctgcttgggcgctacgtcgctcgtccggtgctgcatttcgtggcccgctctggcatgcgcgaagtattcagcgccgtggcgctgtttctggtgtttggcttcggtattttactggagatggctgggctatcgatggcgatgggcgcgttcctcgccggggtgatgctggcaagttccgagtaccgacacgcgctggaaagtgatattcagccgttcaaagggctgctgctcgggctattcttcatcggcgtcgggatgtctatcgacttcggtacgctggtgcatcatccgctgctgattgccgtattgctgttgggctttatggcgctgaaggccgccctgctgtggattgttgcgccctggctcagcgtgccaaagcgccagcgcggcatgtttgccatcctgctggggcagggcagtgagtttgccttcgttatcttcagtgccgcgcagctggccggtgtgctgcctgcggattgggcgaagtcgctgacattggcggtcgcgctgtcgatggccgtcacgccggtgctgctggtgattgccagccgtctggagcgcaatgcgccgaaggacactcgtccgcaggacattatcgacgacgagcacgccagcgtgatcattgccggtttcgggcgcttcgggcaaatcgccggacgtctgctgctcgccaacaatgtgcacacggtggtattggacaacgatcctgaccacatcgaaacgctgcgcaagtttggcaccaaggtgttttacggcgacgcgacgcgcgtagacctgctggagtccgccggtgcggcacaggccaaggtattgatcaacgccatcgacgacgtggaggctaatttagagctgactcgactggcgaaggaaaacttcccgaacctgaaaatcatcgcccgcgcgcgcgacgttgaccattggtatcagctgcgtcagttgggcgttgaggcgccggagcgtgagctgtttgaaggctcgctgcgcgccggtcgagaaacgttggaaattctggggctagacgcctacgaggcccgcgagaaggcggacctgtttaagcactacaacgtgaaaatgctcgaagccacgctggcaaactacgaagacaccgagttccgcctcgccagtttggcccgcgcccgcgatatgctttctgcggccattgagcaggatcaggcgcgtctcggcgagcagcagcaaagctggcgcggcagtattgacggtaaagcgcctgaaaatgaggttattgaagccaaataattattatcggtggcaatgacataaagataatcttataaaggcaaacctatggcaggtttgcctttttatgtgttgtcagctcagcgccactttaatacccagcgcgatcaacaccccgcccagcatcttatctatgaccttctgcgcctttgccagtccacgacgcactgggccactctgaatcagcaccaccagcatcggccaccagacaaccgacagaccgacgataatcgaggcatacagcagtttctcactcagcgttgagttgatttgcagcacctgtgtgaacatcgcgaggaagaataacgtcgccttcggattaagcaggttacacagataaccctgagtaaacgccttgccaagcgtgacctgctgtggcgcgatgccatcaaggttcatcttgctgttggtgcgcgagaacaggccctgaagtccaacccagatcagataggctgcaccgacgtatttcaacagatcaaacagccacggcgtcttcgttatcaccaccgccagaccggccacacagtaggacatatgggtgataacgccgcagacaacgccgagcgaggtcatcagtgccgccatacgcggatagcgggccgcattcttaataaccatgaagaaatccggacccggggagatcatccccaacgcggcaatcgtcgcgacaaacaaagaggtttcgagcatttaactgaccgtcatcaactaactaagaaaatttaggcggcatcatacgccaatcttttttttttaacagtggcagcccgtgttgctcgatttcgtttgtatacttaatcagccgaaacgtattaatcagtttacatggggaactatctccatgcttggcgtggcatgattgtctgcctcgctcgctaaggctgatgctttgagcgcctttcttgcgctggagtcagtgttttatgctgatgaagtccggctctgctaagaggtctcttatatctttatctgagcgcattctccctatcgacggcggattgggctttccgtatagtgtggctcttttctgccccgacatagaatctgttcctggtctgctgtatgtcgtctgccggcggaaccatgaatatgttcttattagctcttcaccaaaggtttcacgatgattatcagcctgatcgctgcaatggcagcggatcgcgttattggtatggaaaacgccatgccctggcatttaccggctgacctggcttggttcaaacgcaacaccttgaacaagccggttattatgggacgcaagaccttcgaatcaatcggacgacccctgcctggccgccttaacatcgttatcagcagccagcctggaagtcacgatggcgtgacctgggtaacctcccctgaagaagcactgtcagcggcaggaaacgcagaagaagtgatggtcatgggcggtgggcgcgtgtatacccagttcctgaatcaggctaaccgcctgtatctgacccacatcgatgccgaagttgaaggggacacccacttcccggattacgagcctgacgagtgggaaagcgtgttcagcgaattccacgacgccgatgaagccaacacccacggctactgcttcgaaattctggatcgtcgcggcgaataatttcgcctcgtttgtcctgatgctataaagcaaaaaggcacccaatgggtgcctttttctttttcattctgccaggggaaagggtttttaagacgcttttggcgcctgttctttctctttgcggcgaatcgctggctgcgtgaaataggttttatcttcccagcgcagcatcgtcatttcgccaccccagcagcagccggtgtccagtccgtaaacgccggacggtgtgccttttccttcgagcgaggcccaatgaccaaagatgatgctgtagccctgttccagaaccgggcttggcagtgcaaaccacggcttaagcgggcgcggcgcatcttccggggcgtctttgcaaatcatgtccagctgaccgttcgggaagcagtaacgcatgcgggtcaacgcattggtgctgaagcgcaaacgggcgaggccggtgagttcatcagaccagttgtttggcatgtcaccgtacatggcatcgaggaacagcggatagctgtcgctgctcagaatagcctcaacctcgcgcgcacacatttttgccgtctcgacgtcccactgtggcgtgatgcctgcgtgtcccatcactagcttcaactcgtcgtcgacctgcaagacaggctggcggcgcaaccagttgataagcaggtccgcatcctcagcttcgagtagcgcagtgagtttatctttgggtttgttcggcgtgatcccgcgtaaatagccagcagatgcaggtcatggttgcccagcaccatgcgcactgcgtcgcctagccccatcacgaagcgcaggacatcgagcgaggccgggcctcgagccactaaatcgccggtcagccagagcgtatcctgcaggggattaaattctacccgcgtcagaagagccttgagctcatccagacacccatggatatcaccaattaaatatgtagacatagtattaatttatcagcgtaggcagcgaaaggcggaacacagggatatccacattgaaggattgattctggtgatcgaccatgaggtagtagccttccatggtgcccatcggcgtttcaaggatggcgccactggtgtagtgaaattcttcgccaggcgcgataaccggctgttcgccgaccacgccttcgccctgaacctctgttttttggccgttactgttggtaatcaaccagtagcggccaacgagttgcacgctaaaacgccccagattgcggacagtcacggtgtaagcgaacacataacgctgctcttcgggaatagactgagcttcaatgtaaacactttgaacctgaaccacgactcgaggctgatttagcataatggaactccggctagggttactgttcgttgttctgctgttcgttgcttttacgcgtcgaaagccagttggccagcttgcagtactgctcgacagaaatgttttccgcccgcatgctcagatccagacccagctctaacatctgctctggggtaaacaagtgacccaggctattgcggatggttttgcggcgttggttaaacgcatcggtggtcaggcgtgccaaaatacggatgtccgatacagggtaaggaatttccgcatgcggagtcaaacgtactaccgctgagtcgacttttggtgccggagtgaaggactcaggcggcacttcaaggactgggatcacgcggcaatagtactgcgccatgacgctcagacggccgtaggctttgctgttcgggcctgcaaccagacggttcaccacttctttctgcagcatgaaatgcatgtcgctgattgcattggtgtaggtgaaaaggtggaacatcagcggcgtcgagatgttgtaaggcaagttaccaaacacacgtaacggctgacccaactcttcagacagttcgccaaagttgacggtcatggcatcggcctggatgattcgcagcttgttggcaagcttcggattcacctcgagacgggccgccaaatcacggtccagctcgataacagtcatgttttccagacgtgcggcgaccggctcggtcagcgcagccagaccggggccgatttcaacaacggcctgacccggcatagggtggatagcggaaacgatgctgtcgatgacaaactgatcttttaaaaagttttgtccaaaacgtttacgggcgaagtggccttggtggactcgattattcattgctgtgttttttcactactgttgttgtcgttgcggacagattgttgtcattgctgactgaggccatgttaatggcaagatttaaagcggtgataaagctgcccacgtcggctttgccggtagcagccaggtccagcgcagtgccgtgatcgaccgaggtacgaataaacggcagcccgagcgtgatgttcaccgcacggccgaacccctgatattttaacaccggtaagccctgatcgtgatacatggctaatacggcatcggcatgctgcaaatatttcggctggaacagcgtatctgcgggcagagggcctatcaggttaattcctttctcacgcagcgaatcaagcgctggcgtgatggtgtcaatctcttcacggcccatatggccgccttcgcccgcgtgtgggttgaggccacagacataaatctgcggagaagcgatgccaaatttggtcttgaggtcgttatcaagaatggtgataacttcgtgcagactctggcgagtgatggcgtccgagacgtctttaagcggcaggtgcgttgtcgcgagcgcaacgcgaagctcttcggttgccagcatcatcactacgcgttcgcagaggctacgatcggcaaagaattcggtatgaccgataaacgggatacccgcatcgttgataatactcttttgcaccggaccggtaatcagtgcggcaaattcgccattcagcgcaccgtcacaggcgcgcgccagcgtctcgaccacgtaagggccattggcgacgttaagctggccgggaacggcgggttcagcaagctgaacgggcaggacggtcaatgtgcctgctgcctggggtttggcacagcctgggcgatagtccagcagacgaattggcagattcagcgctttggctcgggcgagcagcagcgacggacaggcacaaacgacaagctcaacgggccagtcccgttgagccagtgcaagaaccaagtcaggtccaaccccggcaggttcgccgggggtaatcaccactgattgtgtcacgtgggttttattgtccattgccatccagaattttcacgtaagactgtgcacgctgttcctgcatccaggactgcgcctcttctgcgaacttacggttgaacagcagacgatacgctttgtctttcagcacggcatccgttctgtcgacctggcgggtatcaagcaactgaatcaggtgccagccgtaggaagagcgaaccggtgcgctaatttcaccttttttcaacttcagcagcgcgtcgcggaacgcaggatcgtacatgtccggagaggcccagcctaagtcgccgccctgattcgcagaacctgggtcctgagacagctgcctggcttcgtctgcaaagttggcacggccgcttttaatcgctgccgcaacttgttcaagtttagcctgcgcctgcgcatccgtcataacgacagaagttttcagcagaatgtgacgtgcgtgaacttcggtaacagacactttctggtcagcctggcgcagatcgttgactttcaggatgtggaagcccacgcctgaacgaataggaccgacaatctggcctttcttcgcattggtcaacgcctgagcgaacagtgaaggcagaccctgaagcttgccccaacccatgttgccgccgtccagcgcgtgcggatcggcagagtaggtcatcgccatcttggcgaagtcggcaccgtggttcagctcgctaacaatcttcttcgccagcatttcggtctgatcgacctgatcctgagtcgggttctgcggcagtggcagcaggatgttgctgaggttgtattcggcctcgttatcagtctgcgcagacagctgtttcgccagtgcgtcgacttcctgcggcagaatagttacgcggcgacgaacttcaccgttacgtacttcagaaatcagcatctctttacggatctgagcacggtatacgttgtagttcagaccttcataagccagacggctgcgcagctggtcgacggtcaggttgttctgctgagcgatacctgcaatagccttgttaacgtcatcatcggttagcgtaaggcccatttttgaggccatttgcagctggatgttatccataatcaggcggtcaaggatctggcggcgcagcgtctggtcgtcaggaagctgttgtttcgcttcttttgcctgctgtttgacggactgcaacatgtcattgacttcgctttccagaactaccccgttatcgacaacggcggcaactttatcaacctcttgcggtgctgcgaacgcggtgttagcacaaagcaccacgccgaggagaagtgttctccagttcttcatactttttccatttatttaaccgcaaatgcgggttcaagtttcaagtttactgaattcaacatgccgtcgagcatcagaatgcacgttgataaggcagtatgccgctggctaacatttctttggttccgagggtttgattactactcaggccacgaagttcaatgttaaatccaatgcggttgtcatagatgctcgtttggctggttgaatcccagtcggtaatcttgcgttcgtagccgaagttaaccgcccagcagcaggtgctgtactgaacgcccagcaactgatcggctgcctgtttcgccttggtgtcgtaatagtacgcggccaccacggcccaacggtcggcgataggccagctggcaatgatacctgcctgcgagatgccctgctgataacccgggttggtgaggttaggaagcgttgcctcaatatattccgggctggcataacgataactcaactgaaccattttttccgaatcggagcggtattccaacacggcatcgcccagcgccagcgcgtcgagacgagtgtcgtactgcaagccaccgcggaaggccatggtatcgttgattttatagtaggtgtcaccggcccagaccaagctgcctgtgtcgttgctcttgtccaggctgctgtcaggatcaccggtacgcggacgggtgaagtagtagatctgacccgcagacacgttgaaacgctcgaccagattttcgtcatagatacgagaggtcacaccggacgccagctggttagccgaggcaatacggtcaagaccactgtaactctggtcgcggaacagaccggtatagtcggtttgcagcagcgtggagtcgtattcctcgatatcgctctggttgcgatacgggatgtagagatattgcaaccgcggttccagcgtctgggtatagccagagttccagtccatggtgcgatcgaacaccattttggcgtcgctcttgaactctggcatgacgcggttcaccgagctcttcagatcagagtccgggtacaggtcgtaatagctgttggaaatgttctgctggtaatgggtggccattaccttgacttcgttatcccagctaccccaacggttgctcagcggcaggtcaatctgcggggcaatgtgccaacgcgtcgcggacgggtaggcagggttaacgttggtaaatttgacaatctgcccgtaggtatggaagtcgaacggccccagatcgtttttgtagtagttgatgtccaactgcggcatggcgcgatagacattggtcgcactcgtcaaggagtcggcgaagatctggaactgcttggtcgacagcgtcacgtcccagttttcgttggcataacctacgctgaatttctgcgtggcatagccgtcggtcgtggaaccaaacttggagtcgatatcggtaaagtagtaaggatcgctgaccttggtgtagtcaacgttgaagcgccagttctgatcgtaaacgccgttgtggttccagtagaacatccagcgcttggttttatcgacatccgggtgagcagcctcaaccagcttgtcatcagccaggtagtcgaactccatcagaccggcaccgaactgcgtcagatagcggaattcgttctgcaactgggttccacgtttactcatgtaatgcggagtaattgtggcatcgtagtttggcgcgatgttccagtaataaggcagcatgaactcgaagccgttcttgctgccgtattttgcatttggaataaggaaaccggaacgacgacggtcgccgataggcaactgcatatacgggctgtagaacacgggaaccggaccaatgtggaaacgggcgttccagatttcggccagctcttcctgacggtcttcgataaccgtactgcctaccacgctccagctgttatcgccgggcaggcaggaggtaaaggtgccgttgttcaggatggtgtagcggttattgtcacgctgcttcatcatgtcggccgtaccgcggccctgacggcccaccatttggtagtcgcccttttcgacgtcggtatctttggtgttcaggttggagaaggcttttggaccttttaacttaacctgatcgctgaaatacagcacatccccggtcgcggtgaccgtgcgaagaggcgttgcctcattaggatgagaaatctggttgagttgtacctgatcggctttcagtgagctattaccctgatcgacggtaacgttacccgtataaagagcgccgttaggataggtaccctgtagattatccgcctggatcttgaccggaagctggttaggatcgccttgaaccaacggcttgtcataggtcggcacgccgagcatacattgttcagcgagagaggccagcgcgccctggctataaagtgccgtccaaatcattgtggccagcagggtggggaagctttttttcatacgtctatttttcatacgtaaaatgtgtgttccgtcatcagaggcgtcatgccggcaaacggtcagagactatcttactcatcatcgttgcgctagtgttaaaatccacagggttaacgttgtagccgttaggcacaacggtaaatgccggttatgataaagcaaatcttacgcgacggcattgtgaattgaggagtatatgcagtattggggaaagctgctcggacttatcttgggcttaatgtccggcataggcttctggggaatcgtattggggttgctgattgggcatatggtagacaaggcgcgggcctccaaacgccgtggattcttctccgatcagcaaacaagacaaacaatttttttccgcaccacctttgaggtgatggggcatttaaccaaatcaaaaggaagggttaccgaagccgatattcaaattgccagccttttcatggaccaaatgcgtttgcacggcgagcagagagaggcggcgcagcaggcatttcgtgtcggtaaaggcggaaattacccgcttcgcgataaaatgcgtcaattacgcagcgtctgtttcgggcgatttgatctgatcagaacgtttctggaaattcagattcaggcggcgtttgccgacggttcgttgcaccctaacgagcgtcaggtactgtacgttatcgccgaagagctgggcatctcaagacaccagttcgatcagttcctcagcatgatggaaggtggccagcagtttggtggcggccagcagggccaatattcgcacggcagttatcagcgtgctccgcaggggccgacgttggcggatgcgtgcaaggtgctgggtgtgtctgcgacagacgatgcgaccaccatcaaacgtgcttaccgcaagctgatgagcgaacaccatcccgacaagctggtcgcgaaaggcctgccgccggaaatgatggagatggccaagaaaaaagcgcagtcgattcagtcagcctatgacctgatcaaacgcgaaaaaggttttaaataagcaaccggttttggttggcgcgcgctgaacgccgcgtgcggccaaaaccgctttctaaactcacctcctgctttcccctaaatgaaattagaactgaatcgtaattcatgaaaataatcacctcggcgattctttggcacttttcacctccctatttctgcaaggcattgaattttctttgcttagagaatgtcagttaaaaaacattaaataactcgttaactattgtttaatatggtttttttattaaataattagaactatcttatttcatttcttcgacataacttgacccttctacggcgcttgaggtgcaacgcctcacatcgctcattcccctcttcttcgggaaagttaaaagggactttagattatggatacaggcactaacacgcttcgtcaggggcttttttattttcgggtatttttaaggctgctcgtcattctgctcgtcttgccggcaaacgccgaattacccactctgcaacagcctgcgatgagccaaaatgaacaggctacgcgagaaagccatgaagccctggcggcgcaacatctctccgcattagggggcagtttggatcgctcgagagtcaatctggcgacaaactgctgagtggttacgctcagggggtagcgacaggcctggcgggacaacaggccgaaaactggctgaatctcatggggggtcttcgcgcgtcagcctggggagcagcttcggggcctccgagagcgagatagccgccgacgtgttgatcccatttatcgatgataaacaaaaacatctgatgtttagtcaatggggaattcggcggatagacggtcggcaaacgctgaaccttgggctgggtagccgctatttcggtgaccagtggatgaccggtgggaatctgttttttgataatgacctgacgggcaagaatcgtcgctggggagcgggcgttgaatggtggcgcgataatctgcgcctgtctgccaacggctattttcgtattagcagctggcatccgtcgcgagaccttgtggaatacgatgaacgtccggccaatggctgggatctcgaggcctcgggctggttgcctgtttatccttcgctcggcgcgaaagttaagtacgagaaatattacggcaacaacgttgcgctgtttggccgcgagacgttgcaaagcaatcctgaggccatgagccttggcgctagctggaccccagtgccgcttttgacctttgagttaggtcatcgattcggtgcgcagggaaataactccaccatcggtatgatgatgaactatgactttgggcgctcccttgaggcacatttcgaaccttctgaagtcgctgctatgcgctcgttacagggcggacgctacgatctcgtctctcgtaataaccgtattgtcctcgaccatcgcaaaaagaatctgctctccatttcactgccgtcgagtattgaaggaaacagccacgagggagtgtcgattgtcgcgcagacccaggcacgactcggcctggcccgtgttgaatggaacgcatctaccctgacatccgcgggcggcagcctgaccagcaacgtatcgacagcgaaactggtgctgcctccgtttggcgcgactgaagaaaaccgctacgttatcagcgctgtcgcacacgacaatcagggcaacgcctctgcacctgcctatacgacagtcatcgtcaatggacgagcgctaagcctggagaaatcgtcattttctatcatccccgccaccttggttgccaacgggaacagcaccgcagaagccacggtaacgctgcgaggagaagacgataaagcgctaagcggcgaaagtgtcaccttacaactgcaagagatcgtgcaggctctgacctcgtcgagcgaaatcgtacatcttggcgaatttaccgaacatcaacagtccggcatttacaaggccattatcacggcgggtatgacgccgggacaggtacgaatccagtcgaaccttgacgacaagagtctgttttctgttgatgtcatgcttaaagacaacgtcgtgcctgcgaaaatagaaagcctgaccgctcctgacggtgccagtaggcctgtggggcagtcccttaacgtagaggcgttggttaaagattcacagggtaatcctgtcagtaatattaaagttacgttcagtggcccaggtctgaatattacggatgaaacccccactaacgaaaagggtgttgcgaccgccaaggtcagcagtcttgtcgccggtgatgccactctcatggcaaaaatggaaaacggcaatcaacagacgttggaagtccactttatcgcgcccgttgaggaaaacattatcagcttgactgctcctgacggtgccagtaggcctgtagggcagtctcttaacgtagaggcgttggttaaagattcacaggataatcctgtgagtgatattaaagttacgttcagtggcccaggtctgaatattactgctcaaaccccaccaacgaaaaagggtttgccaccgccaggatcagcagtcttgtcgccggtgatgcgactctcacggcaaggatggaaaacggcagtgaaaagacgttggaagtccacttcattgcgcccgttgaggcaaaggttatcagcgtgaccgcacctcacggtgacagtagtcttgtagggcagttcctcaacgtagaggcgttggttaaagattcacaggataaacctgtcagtaatattaaagtcacgttcagtggccctggtgtaaatatcactgatgaaaccccactaacgaaaaaggtattgcgaccgccagggtcagcagtcatgcccctggtaatgtcattctcacggcagagacggaaaacggcattagagggcgttgttagtccatttctttatctcgccgcttgaggcacagattaccagcctgactgcacctgacggtgacagtaggctggtggggcagtcccttaacgtagaggcgttggttaacgatttacagggcaatccttttaataatattgaagtcattttcagtggcctaaatctggatatcactgagaatactttcaccaacgaaaaagggcttgcgaccgccagggtcaccagccttgtgcccggtgatgtcactctcatggcaaaaacggcaaatggcagtacaaaggcgttgccagtccacttcacattgcctgtctcggtcactgcatttgaggcgcagtccacgggatcggatgacgtttttaccgataacgacagcattacggtggtgacagtcaccaatagccagggacaaatggctgctggcgtgccggtcgagctggaatttgatcgcaaagttcttaatgtgcgtaccgatccggtcaagggtatgacgacaaaagacggtaagctgattgtttacgccaaaagccaaggcgaaggcactttcgaaattaaggctaaaaccaaaggcaccgtgggtaaatctaaaaaggtcagttttgaacaatgggccgaggtcgcgaaaatcttcacagagagtcctctttatcagtacgccgatgaggatggcagagatgcagaatttatcattgaggttaaagataaagcgggaaaaccggtggccaaccgtctggtcgagcttgaccttgacggtcgactgcctctctcaaccaccccgtcagacagaagaaccggcagcgatggcaggctcagggtctatgtgaaatcgcccagaaagccggacatgattgactcatacccgctgaaggccaatacgcgcaatactccgcagaaatcgatatatgtgcatgtggtcaagagcgttcgtcccgagtttcagcttctaccaagcctgtcaccgtcagcggatagacctgaggaatatgtgcaaggtaaaagggtacagaattattccttacgtagatcgccaataggtgcacagttgagcctgacagaatatctgtggtaccaggctgatgcttccgacgaatcgaaaaccagcaaaattgccggagcaaacggtgaatggtatacgctgaaaaaagaggatattggtaaacgtgttttttcctgtgccatgataacggacgagtacgggttaaagagcgattggaaatgcacagagaaaagcccagtggtgcagggcttgaatggcaaagccaacatcaagctgacctatgactatacgcttaacgcgggtggtccctttgctaaagacgattatagatggaaggcaaggttcaccaatgcctccgggaaaccggttgcaaacgcaaaaatgtgtttccgaacttcggggcgattcggcggtgtcgaccagaatgatggctatgtaggtacaacggatttgaatggggaggaaacaggaggcgctactcttatgcgtggtacctggacgcttagcgccgcgctgtgcccagatggctatgattcggtggactggggaagcgtaaccgaccgtgtcaaaatggagtgatttgtattatccgtactttacgtttcaactaaaaaaacgccgtgtcattgagcacggcgtttttatctttactgaatcaacaggctgagcggataaattaaaaatctggctcgcagctgaatgtcatcggctcatcggttatcggatgataaatcgataattcctgtgcgtgcagctgaaggcgcggggccattgccagtgcctcggggtgcgcatagaacttgtcgcccaaaatcgggtgacccagcgctagcagatgtacacgcagctgatgagaacggccggtcaccgggcgcagcttcacgcgtgtggtgccgtctgtatcccacgacaacacttcatactgtgtcagggccttcttgccggtctcgtggcaaaccttttgcttcggacgattagggtagtcgcagataagcggcaaatcgataatgccgtagtcttctgccatgtgcccccaaaccctcgcaatgtaggcttttttggtctctcgctcacggaactgacgcttgagttcgcgttcggcctctttcgtcaacgctacggcaatcacgccgctggtcgacaggtcgaggcgatgcacggactcggccacaggataatcgcgctggatacgagtcatcaggctgtcatgatgctcggccgctttgccagggactgagagcagtccgctgggcttattcaccaccatcagatgttcatcctgaaacagcaccgacaaccagggatcggtcggcggatgatagttctcaagcggcagaatgttagacggtggtggcgttatcattgatggctcaccacaatcaggcgaatggcatcgagacgccagctcgcatcgttaagactgttcagcacctgttggcgattagattcaatcgactccagctcgtcgtcacggatgttcgggttcacttctttcagcgccttcaggcgttccagctcgagcgtcaactgctggtcggcttcaactttagcggcttcaatcagcgcctgtgcttctacagcaaccagcggttcagcctgttgcagcatggcatgcacgtcttgctgcacggcattcaccagcttgcttgagttatggcgatttattgcattcagctgacggttaaagctttcaaactcaacctgcgccgcgagattggtgcccttacggtccatcaacatgcgtaccggcgttggcggcaggaagcgggttaactgcagatgcttaggggcctgacattccaccacgtaaagcagctcggccagcagtgtaccaaccgggagtgccttgtttttcaataatgaaacggcacagctgccggtatcgccggagaggatcagatccaggccgttgcgaataatcgggtgttcccaactgatgaactgtgcgtcttcacgcgacagagcctgctcacgatcgaaggtcacggtacagccgtcttgcggcagacccgggaagtcaggcaccagcatgtggtctgatggcgtcagaacgatcaggttatcgctacggtcttcctggttaatccccacgatatcaaacagattgagcgcgaagttcaccaggtttacgtcgtcgtcctgctctgcaatcgcggttgccagtgcctgagccggttcgccgccgttggagtgcatctcgagcaggcggtcgcggccctgttcaagctgcagtttcaacgcgtcgtgctgggtgcggctggcgaggatgaactcatccagaccttcctgttccgcaggcgttgccaggaagccaatcagctgctcgtagctactgtcgtaaatggtgcggccggttgggcaggtgtgttcgaacgcatcaaggccttcgtggaaccagcgcagcaggatagcctgagcggtttgctccagataaggcaccatgatttctatgttgttctgttggccgatacggtctaaacggccgatacgctgctcaagcaggtccgggttaaacggcaggtcaaacatgaccatcttgctggcgaactggaaattacggccttcggagccgatttcagaacacagcagcacctgtgcgccgtcttcttctgacgcaaagtaggcggctgcgcggtcgcgttcaatgatcgacagaccttcatggaataccgcagcgcggatggcttcacgctcacgcagcacctgttccagctggagcgcggtggctgccttggcacagataaccagcacttttttgtcgcggttggcggtcaggtaacccaatagccactcaacgcgagggtcgaagttccaccaggtcgcgttatcgccttcaaattcctgataaatctgctcagggtagagcatgtctaacgcacgagcttcctgcgtcttcttgctgcccataatgccggacactttaatcgccgtctgatactgagttggcagaggcagtttgatggattccagatggcggtccgggaagcctttaacgccgttgcgcgtgttacggaacagcacgcggctggtgccgtggcggtccatcagcatcgcaaccagcttcttcgcggcgtcttcatcgcctttattggccgcggtcagcagggcatcgacgtcggcattgcctacgctctcgcccagcagcgccagcgcttctggcgtcagcggctgcttgttcagcagcagagtgacggcatcagcaacaggctgatattgctgttgttcttccacgaactcttcgtagtcgtggaagcgatccgggtccagcaggcgcagacgagcgaaatggctttcctgacccagttgttcaggcgttgcggtcaacagcagtacgctagggatagtctgcgacagctgctcaatcaccatgtattcgcggcttggcgcgtcttcgctccacaccaggtggtgggcttcatcgacgaccagcatgtcccactcggcgtcgttaagttcttccagacgttgtttgttacggcgcacaaagtccagggagcagatgaccagctgttcggactcaaacgggttggtcgcatcgtgacgagattccgcgtagcggtcgtcatcaaacagagagaaacgcaggttgaagcggcgaagcatctcgaccaaccactggtgttgcagggtctcaggtacgactatcagcacgcgttcggcgcggcctgacagcagttgctggtggattatcatcccggcttcgatggtcttgcccagaccgacttcgtctgccaacagtacgcgcggcgcatggcgctgacccacttcataagcaatatgtagttggtgtgggatcaggctggcgcgcatacctcgcaggccgccaaactcaagacggaactgctcgcgctgatacttacgcgcacgaaaacgcagcgcaaaacggtccatacggtcaatttgaccggcaaacagacggtcctgaggcttgctaaaggtcagcttgctgtcgagcaagacctcacgcatcgcgacaccttcttcctcggtatccagacgcgtccccaggtaggtcagcagacctttgtcctcaaccacttcttcaactttcagctgccatccctcatgacagctgatggtatcgcccgggttgaacattacacgggtgattggggaatcatttctggcatacaggcggttttcaccagtagcggggaaaagcagggtcaccatacgcgcgtccaccgcgacgacagtacctaaacctaattcgctttccgtatcgctgatccagcgttgaccaagtgtaaagggcataatgtctctctgtgctttgtgtctgtgtgtcgggccgtagggctgagcccctaaactttatgtaatagcttttctttccccgcctggaaggcgtggagtctttaaatgtgtgaggttagataagaaatgggaaagggcgctatgttaattgaaggtaggccattcgtcacctttcattgcgccttctggctaaaacaatcccatttgtcccgttatcagtgtagtaaaatcgtcctgcagaaaaggcagtatgccgtcagcaacgggttcgagctgtttctcaatatagtggtcgtagtcgatgggggactgacgattttccagcggttccgggcccgaggtggtcatcacgtagcttatccagccgccgttctgatactgcatcggccgaccctgggcctgattgtattcatcggcaagtcgagcggcgcgaacgtgcggcggaacgttgcgctggtattcggtcaggcgtcgacgcaggcgtttacgatagaccagctgtgggtcaaattcaccgcttaacgtgcggttgacataatcacgaatatagtcctgatagccttgatgatgaaaaatgcgctgataaagctcctgctggaaggtctgtgccagcggcgtccagtctgtgcgtaccgtttcgaggcccttgtaaacaatatgctcgccttcggcatcttttaccaaaccggcgtagcgctttttgctgccttgttcagagccacgaatggtgggcattaaaaaacgttggtagtgagtttcaaactccagctcgagtgcgctttctagccctaactcctgccctaaatgcattttccaccaggcattcaccttggcaaccagccgtttgccaatctcgtcggcctcgtctgcctgatgagcgcggttcaaccatacgaaggtagagtcggtatcaccataaataacctgataaccctcttcctcaatcagctgacgagtctgctgcatgatgtcgtgaccgcgcaaggtgatcgacgatgcaagccgcgggtcgaagaagcgacatccgctggatcctaacacgccataaagcgcattcatgataattttcagagcctgtgaaaggggcaagtttttctgttttttggccgcctcacgaccctgccagatttggcggactatctccgggagacaatgctgcgtgcgcgagaaacgcgcctgccgataaccgggaacagaatgctcatcgtcgggttgtgcaagcccggttatcaggcctacagggtcaatcaggaaggtgcgaataattgacggatacaggcttttatagtccagcaccagaacagagtcatacaatcctgggcgagagtccatcacaaatccgccggggctgttttcttccggcctctctcccaaattcggtgcaacgtaaccgatacgatgcattcgcggcagataaagatgggtaaatgctgccaccgatcctccgctgcggtctgcggccagaccggtgactgacgcgcgctcaagcaagaaggaaagcagctccgttttggcaaacactcgggttaccagttcacagtccttgaggttgtagtgagccagtgccggtttgtcttgctgaaaccgttgctcaatctcggccagtcgttgataggggttgtcgctggctttgccttcacccagtaatgtttgcgagacgtattccagactgaatgacgggaagttccaggtcgctgactttaatgcttcaatgccgtcgatgatgagtcggccagtggcctgtgcaaagaagtgcccttgcttaaagccgtgctcccgccattcaagcgcactgccatcacgcccaaaacgcaggggatttgataccgctcggcgtgcttttgcagcacgcgcaggtcaaactgcaccacgttccagccaatgatcgcgtcggggtcatgcaactggagccagtcgttaagcctttgcagcagctgcgggcggctgtcgacgtattctagcgtaaagtcggcattggcgtcgggcgtgccgttgggaggccccagcatgtaaacctgccgctggccacagccttccagcccgatgcagtagagttcaccgttgccgctggtttcaatgtctagcgagcagagtttcaggctaggtcggtaggcctcggcgggcttcattcgggtgtttagcagcatggcatcctgacccggagtgccgctaaaccagacgggggcggtgatatagcgctccatcaggaatcgttcaggcggtcgaatgtcggcttcatagagcgtgaggccaccgtctttgagggttttctctatgcgcatcaactggcgatgcccgcggcaatagaggcctagcacatcgcgcaggtggaaatctttgagcggcagaggacgtagttcataacctttctctgcaaagagcagctgctcggctctggcccgctgttccgacggcaaaaaggccaccgactcctgtgggggagtctaaccttttgcgggccttggtccgtggccagccaaaactcgacctctgtgccctgtggggtgtcccgccagtgacgagtgaggacaaaaccctgacgtggttgagtttgctgatttttttgcgcggcgacgtggttgataacgacctcagtcaataacgatggatgcttcagtctgaagagaaaggggctggctgagcaaaacctgtaagcgttaaatatagcatggttatttatacagttcccgttgttaagatacgcgataagggccaatgcagaagggaaggattaaatgcacatacaattagtgggttgactcgtcttaaccatttaccgacaattcagcctctttcattttcgcttaagctgtgtcgggtaaacttctgtatcccctcacagagagtcaaccgcctgttgtgagtcgacagtcttcaaccttgatttacctgaagtcattaaaggtttgctgtacgcctgatgcgtaccttaacactggaattttatggaagcctatctacaacatttggtcgctcagtccgtgggtttcgcgcttatccttgtttctgttgtggcgtttttcgagtcgctggcactagtgggtttactgctgccgggcacggtcatgatggcaacgctgggcaccctcattggcagcggacaagtgggtctatatgaagcctggctggcagcaggacttggatgtttcgttggtgactggacgtcatactttattgggcgtggattcaaagggccgctgcacaactggtcgtttttgaaacgctatcaggcattgctcgacaaaacgggacatgcacttgagcagcatagctttgcgaccgtaattttggggcgctttattggcccaacgcgtccgctggtgccgctggtggcggggatgcttaacctgccgccactgaaatttgcaccgccaaatattgtcggctgtatcacctggcccccggtttattttttgccaggtattctggccggagtagcgatagatattcctcacagccacagcagcacggtctttaaatgggcgttgttcattaccgttgtgctgatttggttaagtgcctggctggtgtggcgttggatacgttccgaaaaggtgcaagccgatgccgtctcgaagtggctgccgctagcgcgcctgcgttgggtaagcatcatcagcctcgtcgcaacagcggtgagtatttatatgttgagtaagcagccgctgatgccgatttacgcgcatctactctataaagtcatcacccgctaaccccacttcgtccttgatgctgtagcttcgttggctgcggcgtctcgcctgaattacttactgatgtggcgttgagaggattatttattgacgatccccagtatcgctgcttcggaggcggtgccgtctaccagcgcctgcgttgggccgtcgtagtcaacccggccatcgactatcagcagtgtgcgttctgctattcgtgctgcgtcatcgagattgtgggacaccattaacaaggtcagctgccgttggtcgcagacgttatctagcagcgtcagcatttcgctgcgcagtgccgggtctagcgccgagaagggttcgtccagcagcaatataggctggctgcgcagcaggcagcgcgctaaggcaacgcgctggcgttgtccgcccgaaagctgcgagggtaacctgtccaggcactcttccagcccaacctgttgtgccaatgcttcgagttcttgcttctgcgattgattgagtttcaaacctgggtgcagccccaggcccatgttctggcgcacggtcagatgggaaaacagattattttcctgaaacagcatcgagacaggccgtttggccggtggcgtgctcgtatggtcctgctggttaagctcaatctcaccgcgtcctggtctaagaaagccggcaatcaggcttagcagggtgcttttacccgcaccgcttgggccaagaatagccacacgttcgccggcattgatctgtagatcaaagcgcatcggcagattatcaaacaggtaagtgactctattgagtgtcagcatggcggcccggcagtctttcgataagagtaaacagcaagaagcagaggaacagtaacagcatcgctgtgacggccccctgttggcttcgataggagcccatctgttgatagagatagaaaggcagtgtgcggaaattttcattaccaaacagtgcaataactccgaaatcacccagcgacagtacgcaggcaaatgccagcgcctgtgtcattgggcgcttcaacgcgctgagttcaatccatctcagtcggttccagccgcgcatatcaagcgagaggcacagctgggtgtagcgttcggcgacgtcgcgcatcggattttcgagcaccttaagggcgtaggggacagccatcaatgcgttggtcaaaattaccagcgcccatggtgactgtggcagcccgacggtgtcgttaagcaacagaaagaagccggtggcaagaacgataccgggcatcgccagaatcagcatgccggaaagctcaaagctctggccccattgatgacgctgccgcaatcgcagttctcgactggtccatagcagcatcatggtcagcaacaagcagagtaggccgctgcctgcggcgaggcgcaccgacatccacagcgattgccagagtgcgtcttgctgcagcacgtttaacagtgaagcatttactccgccaagcactactgcgagcagcggcggcaggataagcaataacgcgagagtaatcagtagagtatcaaacactcggcgcagcagagagtcgtccggattgcgccagcgctgcgcgtgggtatgacccaccggcagagcttgactcagcttctggctgagcaacactaatccaaggcagcaaaatagctggatgagcgccaacagcgcggcgcggccgaggtcatagtcgtaactaagtgcttgataaatagccagctcaatggtggtggccttcgggccgccgccgagtgagagcacggtggcaaagctggcgaagcacaacataaaaattagcgcacccgcaggcaatatttggcgtttcagcgcgggccattctacgaacctgaactgctgccagccgttcatgccgagctgcgcggcaagctggcgttgttcaatggcaatattttcaagagattgcagcagcaatcgcgtcgccagtggcaaattgaaaaatacgtgggcgagcagaatgccttgtagcccatagggtgagaagcgatagggaaggccaatgagggcacacagctgagaaagccatccttcgcggccatagacgctcaaaataccaaacaccgcaaccagcaccggcaggaccagcgtcatggcgcagagacgcagcagccactgcctgccgggaaaacgtcggcggtaaagacttcgcgccagcaaaatagcaggaagcatggaacacagcgccgacagcaatgcctgccagaaggtaaagcgaatgacgtgccagagatagctgtcctgccagactgacctgaacgccagcgccggtgcgtggtgcagcagcgaccccagcgccaaaaaggcaaccagcaggataaccagtgcggctatggcacccggccatagccaggcagggatcagcggctgacggcgttctgccatgcctgagtccatttactgcggttttcagcgacggtcttggcgctgtattgaagcgaaatagctggcacgataagggcatcatatcctgccggcagcggcgttttgaccgcaggatacatccagttgccggtcgggatcgcattctggaagcccgggctggtgacaaatttcataaattttgcagccagttcaggatgtttgctggcagccaactggccggcaacttcaacctgcatgtattggccttcgctgaagttggccgccgcataattatcttttttctcttcaatgatgtgataagccggagaggtggtatagctcaacacaagggagctctcgcccttcaggaacaagccataagcctcgctccagccttttgtgacggtcacggtcttcttggccagcttctgccaggcctcaggcgctttatcgccgtagactttttgtacccacagcagcagacccagacctgggtactggtgcgaggatcttcgtagataattgtccacggttgcgggctgtcgaccaactcttgcaggctcttcggcggattcttcagcttgtttttgtcatacacgaaggcgaagtagccgtagtcgtatggcacgaaggtgcggtctttccagccacccgggatgtccagcgcagtcttgtcgaccgccggtttggcgaacagaccggtttgttccgcagcctgcagcaggttgttgtccagacccacaaccacgtcagccgggctgttttttccttccatacgcaggcgattgagcagcgagacgccgtcttccagcgggacatatttcagttcacagccacagttggcctcgaaggctttcttgatggccggacctgggccccagtcggcagagaaggagtcgtaggtgtaaacggtcagaacaggcttggcggccagcgccggtgcggcgacaagcatcaggcagggcagtaattttttaaacactttgcactccaactttacctaaagaaaaataggggggcaaaggactttgagtcagcgggatgcactctcaaatcccttcgccggtattaaccggatcaggttcgacgggttttttctcagcctcttccccgcttcgccgtagcgaaaagcgtgaatcagcaccccgttgagaacgcgctattgtagagattaagttaatgggttgaaagcgggtttatgcgtcaggaggcgcaaaccaggcagatttaaagtcgaaccaacccagcgtattcatccttacgccgcgcatgctgcgctgtccctgtagcaaaagccaatggtgaaacagagggtgaatgtgtccgccgttgaccagtttctgcgtccattccgccagtggcagttcaccggcacgccatttctgcgccgcattctcaagcctgtcaccgagacaaaattgcatcagcggtagctcgaacaaggtggcaaacagcgaaaactcaatcggtagggtaaagttggcgctgccgagccacaaatcgctctttgcctccccacgatgccaggtagcgtaatcaactatctgcacgttgagcttcacatcgtgtgccgccagcagcggggcgagcgcctggcagatgtcctgatactctgagtgatcgctgtaaaaggtgagggtgagttctttaatatctatcggttttggctgctgtagctgggggcgtcgatggtgccagcgcggcaataatccgtatgccggtgaccaatagcgttgatacgcaggagcagaagcattgagcagcgcaatcggattaatcacctcacacagccattcccgcagcatagtattgcttcccgccggagaacgctggtcgaagagcacaaagtagcagccttcttcgagtcgactttcaagctgatcgttagcggtatcgtcagcctgtagttgaacgccagagtgcactaattcctcggtcagctccggcagtacccagatgttgacctcatcgagcagcgcccgatagccaaaatactcatcaaaggcacggatcctcagctgcgtttgctgattatgcaccaccgcataggggccggtgcctatggggtgacgggcaaaatcaggcagtgacgcccactcctgcggcaggataagcgcatgtacgctgcccagtagccagggcaaccagtggtctggctggcggagatgaatatcgatgacgtttggcgttggcgattcgacccgtgaaaagtgagtgaacagcgggtggtgttttaaacgggcaaaggtggtgatgatatcggtcatctccagctctcgaccgtgatgaaaatgaatcgccgggcgtaaataaaagcgccagtgaagcggggtaacagattgccaatgatgggcgatatcccctcgtagttccccgttttcctcatttatgccaatcaggccgctgaagatctgtcgcgccagatgcgtctcagaacgtcttagcatcgagcccggcaacaggttaggcagcgagcgatagtaaagtacacgaagtatatgtttaccctggcgaaaacggcgaccgagctgagaaagcagcatctgtcgcaccagcgttttgtcgccaaccagctgtaccacttggtccacccgatcctgttcgatcagctcctcggcccgcagttgctggagcgcgaggccggtaaggtggaacgtcagtcgcgattttttacctcttcccgattcagcttcccagtttatccagccctcattctgcatgctgccgagcagcgatcgcatgtgccgacgtgagcagttaatggcctccgacagcgactgtagcgtggtctctgcggattgaccctggcaatgctgccacagtcgcaggaactgctgttgcaagcgaggtgaggacataaaagaggaactcctgtcataaaactcatcaatttatctttcctcatattacgcccataatccctgtcatcaaacagtcctgtgccgtgatgcatctagcttcgcggccggtaaacagttttctgagtaatggtgaaacgtcgccagccagtgggttctctcactggtttttttctgttcctcacttagtctttgagttaaacggggtatttcactcttccgctttgccgcaatcagggatggtttatgtcttctcgccgcttgtcgattatcttcgctacatttctgctggtttcctttttaacgggtattgccggagcgcttcaggcgcctacgcttagcctttttctgaccaacgaggtgaaagtcaggccactgtgggtcgggttgttctataccgtgaatgcgctgggcgggatcgttatcagctttttgttggcgaactattcggataagaagggcgatcgtcgaaaattgctgttcttttgcaccctgatggctattgggaacagcctgatttttgcctacagccgcgactatctggtgcttatcagcgtcggcgttttgctggccgccatcggcaacgcctccatgccgcagctgttcgccttggcgcgagaatatgccgacagatctgcccatgaagtggtgatgttcagctcgatgatgcgtgcgacgctgtctctcgcctgggtgctggggccgccgatttccttcacgctggcgctgaactacggctttacactgatgtatctctgcgccgctggcgtatttattttcagtgcgttgatggtgtggttcttcctgccttccgtcgggcgaatcgagcaaccggtcgataaggtcgtggtacacgtcagcgcatggaaaaaccgcgacgtccgcctgttgttctttgcctctttgctgatgtggacctgcaatattatgtacatcattgatatgccgctgtatatcacttcagatcttgggttgcccgagggcttgcgggtcttttgatgggggcggcggcagggcttgaaattccggtgatgctgattgcaggttatctggtcaagcgcaccggaaaacgccgcctgatgctgtgcgcggccgtatttggcattctgttctatctcggattggtgcttttccagtttaaggccgcgctgatgatcctccagctgtttaacgccattttcatcggaattatcgccgggatcgggatgctctattttcaggatctgatgcccggcagggcgggttctgccaccacgttgttcaccaacagtatctcgaccggagcaattttagcgggcgtgattcaaggcactatcgtgcagaacttcgggcattatcaggtttattggatggcattagcgctggcggttggggcattggtgctgatgacgagggttaaaaatgtttaacccgcctcgcagcgggttaagagtttagtactaactggttcaattacttcatgaatgacggctgctttttctcataggccgagatgctttcttcgtgctgaagggtcaggccgatgctgtccagaccgttcatcatgcagtggcggcggaagctgtcgattacaaacgcatactctttccctccggctctgactacctgattttcgagatcgacttcgacgctaatgcctacattttctctcgttaatgtaaacagctcgtcgatctgctcttcgctgagcgtcaccggcagcagctggttgttaaacgagttgttatagaaaatgtcggcaaagctcggagcaatgaccgcatggaaaccataatcggtcaatgcccacggcgcgtgctcacgtgaggagccgctgccaaagttttctcgtgccaacaatatgctggcaccctgatattcaggtttattcagaataaaatcagggtttggggtatagccttgcccttcgagatagcgccagtcgtaaaacaggaactgcccaaagccaacgcgtgtgaccatttgcaggaactgctttggcacgatggcgtcggtatcgacgttagcaatgtccaacggcaggaccagaccggtgtgggtgataaatttaaccacgcgcgtctccttggttcagttcgcggatatcggtaaaatgaccgctaaccgccgctgccgccgccattgctggactcaccagatgcgtgcgtccgccgcgaccctgacggccttcgaaattacggttgctggtcgaggcacagcgttcgcctggattcagacgatcgttgttcatcgccaggcacattgagcagcctggcaaacgccattcaaaaccggcctcgatgaagattttgtccagaccttcttcctctgcctgtgctttcaccgggccagacccagggaccacaattgcctgcacgccagcggcgaccttgcggcctttggctatggcggcggccgcacgcaagtcttcgatgcgcgagttggtacaggatccgataaatactttatcaatggccacgtcggtcagcttaatccccggcttcaggttcatgtaagccaaggctttttcagcggaagcgcgctcaataggatcgctgaaagaggcaggatcagggatagtctggttgacgcccatcacctgaccgggattggtgccccaggtgacctgaggggcaatgtcggccacatctagcgtgacaacttgatcaaacgtcgcgtcggcgtcggacttcatggtttcccaataggcgacggcgtcgtcccagtcctgacctttaggggcaaacttacggcccttcaggtaggcataggtggtcgcgtcggaggccaccagcccggcttttgcgcccagctcaatcgacatgttacacagggtcatacgaccttccatgctcaacgcctcgaccgctggaccacagtattccacgacgtgaccggtaccgccggcggtgccggttttaccgatcactgccagaataatgtccttcgccgtgataccgacaggcgcatcaccaacgatttcgattttcatcgtcttcgcgcggccctgtttcagcgtctgcgttgccagcacgtgctcaacctctgaagtcccgataccaaacgccaatgcaccaaacgcgccatgggtcgaggtgtgcgagtcgccgcacaccagcgtcatgccgggtagggtcaggccttgctctgggcccatcacgtggacgatgccctgataagggtgcttgaggtcgtataattcgatgccaaattcagcgcagttcttgattaactcctgcatctgaattcgcgccatttcaccgctagcgttgatgtctttggtctgagttgaaacgttatgatccatggtgccgaaggttttacccggttggcgcacgccgcgattcatcgcccgcagaccgtcaaaggcctgcggagtggtgacttcatgaatcagatggcggtcgatatacagcagtggcgtctcgttctcagcctcgaacaccacgtgcgcatcgaataatttttgatataacgttttggacattacgccccctcggcaacaacacgcgcaatgatgtcgcccatttcattggttcccatggcctgaccgccctgcgccaggtctccggtacgatgaccctgttccagaaccttgttaactgcctgttcgattgccgtggccgcgttttcggcacccaggctgtaacgcaacagcagtgcggcagacagaatttgggcgatcgggttggcaatgtctttaccggcgatgtccggcgcggagccgccagcaggttcaaacagaccaaatgactcttcgttcatgctggcagaaggcaacatgcccattgaaccggtgatcatcgcgcattcgtcggacaggatatcgccgaacaggttggaacacagcatcacgtcaaactgcgacgggtctttaatcagctgcatggtcgcattgtcgatatacatgtgagtcaggctgacgtctgggaaatccttcgctacttcgctgaccacttcgcgccacaggattgaggattgcagcacgttggctttatcgatggaggtcactttattgccgcgtttgcgtgccgattcgaaggcgatgcgggcaatacgttcaatctcaaaacggtgataaacctcggtatcgaaggctttttcatgcataccttgaccttcgcggcctttaggctgaccgaaatagatgccgccggttaactcgcggacgcacagaatatcgaaaccccgtgcggcgatgtcactgcgcagcgggcagaacgcttccagcccctggtacaggcgtgccggacgcaggttgctgaacagcttgaaatgcttacgcagcggcagcaaagcgccgcgctcaggctgctcgtctgccggcaggtgttcccattttggaccgccaacggagccgaagagaattgcatctgcctgttcacagccggcaacggttgccgctggcagcgcagtaccgtggttgtcgatggctgcgccacccacgtcgtattcacgggtcgtgatattcaaaccaaagcgctggcgcactgcctcaagcactttataggcctgagccataacttccggaccaattccgtcaccgggtaatacagcaatatgatgggtcttactcatgttcacaccgtttcctgattattttgtttgctagtctgggtaatacgatcgctttgcagacgctgtttttctatctcgacttgtttgctgcgccagatgctgttcagcacatgcaccatcgctttcgcggaagattctacaatatcggttgccagcccaacgccgtggaaacgacgcccctggtaagacacaactatatcaacctggcccaatgcgtcacggccgtggcccttcgccgtcagctgatatttgattaattctatctgatagccggtgatgcgattaatcgcctgatatacggcatcgaccggcccgttgccggtcgccgcttcggtttgaatttcttcaccgcaggccagatttaccgaggcggtggccgtgatgcttgaacctgactgcacgctgaagttatccagacgataaaactcaggctcttcctgctgtttgttgataaacaccagggcttctaaatcataatcgaaaacctgcccttttttgtcggccagcttcaggaaggcgctgtacaggtgatccatattatagtcggattccttatagcccatctcttccatacggtgtttcaccgccgcgcgaccagagcgagaagtcaggttcaactgtacctggttcaggccaatcgattccggcgtcatgatctcatagttttcacgattcttcagaacgccgtcctgatgaattcctgatgagtgtgcaaaggcgttagagccgacaatcgccttattgcccggaatgggcatgttggttatctggctgacaatctggctagtgcggtagatttctttgtgattgatgttggtatggacctgcatgtattcagagcgggtcttgatagccatgataacttcttccagcgccgtattgcctgcgcgctcgccaataccgttcagcgtgccttcaacctgacgcgcaccggcctgaattgccgcaatcgagttaccgaccgccatgcccagatcgtcatggcagtgtactgaaatcacggctttatcgatgttcggaacgcgttcatacagattggtaatgataccgctgaactggtgaggcgtggtgtaacccacggtgtcaggaatattgatggtcgttgcaccggctttaattgcggcttcgaccacgcggcacaggttgtccagcggtgtgcggcctgcgtcttcgcatgagaattccacgtcgtcggtatagttgcgtgcgcgcttgaccgaatgaaccgccatatccagcacctgatcgaaagaacgcttcagtttggattcgatgtgcagggtagaggtggccaaaaatacgtgaatacggaaggcttctgcaacgcgcagcgcttcggcagccacgtcgatatcgccgtcaacgcagcgtgccagaccacaaacgcggctgtttttaatctgacgggcaatggtttgtaccgactcgaaatcaccaggagaagaaacaggaaaaccgacttccatgacgtcaacgcccattctttcaagggcgatggcgatttgcagtttatctttcacactcaggctcgcctgcagtgcctgttcgccatcacgcagcgtggtatcgaaaataatgacttgttcgctcatcttattgttccttgtctgggttactttcgcgcgttgcggataaaaaaaaacccgcgcatttgcgcgggtttgctgtttgtggaggctgaaatcagttgtgattttcacccactggcataccgcgcaatgaatctgcgttgagtagtaggccaagtagacgggtgaatttaaacatgtgtatttcaacttctcagtatttgggggcgttttgcctgtggcctaaattgatacgtgaatgtgaagttgatgtcaacttaagaatgtttgaagtcacaaaatgacaaagagcagagagggagagtgaggcggaataaaattctgcctttgtctaaaaatctggtgcgattgttggtgtggatcggatggaggcgttgaatctcgaaaattatcagcttttactcattattttcgggctcacaaaacggataatcaggaattactcatgcttgaaaatggcgctttgggttagcttattgaactaagtcttaattgtctttggccggctgtttattcgcgtgccaggtaatagggttttttctgcgcattggttttaatgggcttatattataatttgggaggcgcaatgtctgacgttattttagataaaactcaggatgaaaatatccccgacaatactctgcgaacccgtcacgaggacaatcatttgcgtcgtgcggatttaaatttattaaccgtatttgatgccgttatgcaattgcagaatattactcgtgcggcacaaatgctgggtatgtcgcagccggcggtgagcaacgccgtttcacggttgaagaatatgttcagcgacgagctttttgtccgttctgggcgcggtattgagccaacggcaagggcgcaccaactctatggcccgatccgccaggcgctgcagctggtcaccaatgagctgcccggcctcgggtttgacccacagaccagtagacgtcaattctcaattactattagcagcccgctcgatatcctgctggcaccaaaaattcttagccgcctcagccagcgctctcattgcgtgacgcttaatatcgagtcgctggttaacgaaaacctggacaatcagctgcgttatcaggagctggagtttgccattggttatcgtggtattgaacgttctgatttttataatcagaagttgttcgacgatgagctggtgcttatttcctccagaaatcatccgcgaatagggcagcagagcagtgagtgctactactttaatgagaagcacgcggtggtcaggctcagcaatcactgctcattcagctctccttattacaatacccctgaaactcagcaaagagtctgctatcagggcgcgagcctcatcagcgtgatggagatagtctcacagacgcagatgctggctctggttcctggatggctggctgagcaaaacgcccatcggctgtcgttaaaaatagacacacttgactggatgaacaacaagttaaccagttatttatcctggcatgagtctgccagtaaagataaaggaaatctgtggatgaaagacttgttaatgcagtgtgcggagcttgaataaagagtgcaggttattaattgattcgcgtgacggacaatgcgcacagagtgaattgtcagtggttaatattagctgtttatgctttagcagatttttatactaaggttttcagacggaaatttcttatcctcgcaagccgtgaaatctttcttctgggctcacttcttcctgttaacagagggagtgagattcagtaatgaggggctggattcattaattttgttaaaaatcaagagaaatgatcttgcttatttcttatatcgtgatgccgatcacttaattgcgctaagaaaattatgtccatctggggcataatttaactctgtaattctttccttcctcgttatttcccccagatggccgacccgttatatggttttttatgttgataagttgattaagcgcagcggcaggctgttttcagcaacaacacgcattattttgtcgtttgcctggtccaaattctgacgttaaggtaatcagttatattgcagaacgataattgcataacgaacaaagcatactaaagaagggtgcgaagccctcttatccgggattagggaatgatttccgacatccattagaaacgagtcgtcctaaagaacaaaagcctggaggcaaacccatggagatgttgtcaggagccgagatggtcgtccggtcgttaatcgatcagggcgtaaaacatgtattcggttatcccggcggagcggtgttggatatctatgatgccctgcacacagtcggcgggattgatcatgtgctagtaagacatgagcagggcgctgtgcatatggctgatggctatgcgcgcgcgacgggagaagtcggcgtggtgctggtcacctcaggtccaggtgctaccaacgcaatcaccgggattgctaccgcttacatggactctattcctatggtggtgctctccggtcaggttcacagctcactgattggttacgatgccttccaggaatgcgacatggtcgggatctcccgtcctatcgttaagcatagttttttggtcaagcgtgccgaagatatccccaccgtcctgaagaaagccttctatctggcttcaaccggtcgaccgggtccggtggttattgacttgccgaaagacgtcgtgaaccctcaggtcaagctgccttatgcttatcctgagcaggtgtcgctgcgctcttataacccgacggtgcagggtcaccgcgggcagatcaaacgcgctctgcaaacgctgatatcggccaagaaaccggtgctttacgtcggtggcggtgcggttaattctgagtgtagcgctgagctgctgaagcttgccgaaacgctgaatttgccggtgacctcaacgctgatggggctgggcgcgtttccgggcacccaccgtcagagcgttggcatgctggggatgcacggcacttatgaagccaatatgaccatgcacaatgccgaccttattttcggcgtgggtgtgcgttttgacgaccgtaccaccaataaccttgagaagtactgcccgaacgccaccatcatgcacattgatattgacccgacgtcgatttcgaaaacggtgaatgccgatatccctatcgtgggtgacgctaaacaaacgctggtgcagatgcttgagctgcttgaaagttctgacgaaaagcaggagcttgacgcactgagcgactggtggcagagcatcgaacaatggcgtgccaagaattgcctgggctatgacaaaaatattggcaccatcaaaccgcaggcggtgatcgagactctgcatcgtttgaccaagggtgatgcctatgtcacctctgacgtgggccagcaccagatgtttgctgcgctttactatcagttcgacaaaccgcgtcgctggataaactccggcggtctgggcaccatgggctttggcctgcctgccgcactgggtgtcaaactcggtctgccagacgaaaccgtggtctgcgtaaccggtgacggcagcatccagatgaacattcaggagctgtctaccgcgctgcaatacgatctcccagttgttattgttaaccttaacaacggctatctgggcatggtgaagcagtggcaggatatgatctattccggtcgtcactcgcagtcttacatgcagtcgctgcctgatttcgtcaaactggccgaagcctatggtcatgtggggatggcgattcgccatcctgacgagttggaaagcaagctggcggaagcgctggcaatgaaaaatcgtctggtatttgttgatatcagcgtggatgaaaccgagcacgtttacccgatgttgatccgtggcggtggaatggacgaaatgtggttaagcaaaacggagaggacataatcatgcgccggattttatctgtactgttagaaaacgaatcgggcgcactgtcacgcgtggtcgggctgttctcccagcgcggctataacattgaaagcctgaccgtggcgccgaccgacgatcccacgctctcacgcatgaccattcagaccgtgggcgatgccaaggttcttgagcagatagaaaagcagctgcacaagctggtcgacgtgctgcgagtgaacgaactggtgcagggcgcccacgtcgagcgcgagataatgttggtgaaactgcaggcgaccggctacggacgcgaagagatcaaacgttctaccgaaatcttccgtgggcagattgtcgatgtgactgctacgctttacacggttcagcttgccggtaccagcgacaaacttgacgccttcctcaacacggtgcgcgaagtcgcagaaattgttgaagtggctcgttcaggcgtggtcggtgtgtcccgtggtgacaaggtgatgcgctaacaggtcatcgcccggcgacaaatgtgttttgtgtcgtcgttcaaaaagctcaacttcggttgggctttttttgttatggggcgatgagttatcgtaaaacaccttgccgagtagggtcttctcgggttagatattgagagtatttacttcaattaaggggttcgtggtgaaactggatgaaatcgcgaggttagcgggtgtttcgcgtaccactgccagttatgtaattaatggcaaagcgaagcagtatcgtgtcagcgataagacagtcgagaaggtcatggctgtcgtgaaggaacataattatcaccccaacgccgttgcagcaggtttgcgcgctggcaggacccgttcgatcgggctggtcattcctgatttggaaaataccagctataccaaaatcgccaattttctcgagcgtcaggcgcgtcagcgcggctatcagctgttgattgcctgctccgaggatcagcctgataacgagatgcgctgcatcgagcatctgcttcagcgtcaggttgacgccatcattatctcgacctcgctgccgccggagcatccgttttatcagcgctgggccaaagacgactttccgattattgcgctcgaccgcgcacttgatcctgaaaactttatcagcgttgtcggtgcggatcaggaagatgccttcatgttggcgcaggagctgcgcaacttcccggccgagagcgtgttgtatctgggcgcactccctgaactctccgtcagcttcctgcgtgagcagggattccgtcaggcttgggaaggtgacgcgcgtcaaccagagtatctttacgccaacgcctatgaccgcgactctgcggcgcaggtttttgcccagtggctgaagacccacgagatgccgaaggcgttatacaccacctcgttccagctgttgcagggagtgatggacgttaccctgagagagaaagggcgtctgccgtccgatcttgcgatcgcgacctttggcgacaacgagctgctcgacttcctggaatgtccagtgcttgccgtcgcacagcgtcatcgtgacgttgcagaacgcgtgctcgagctggtgcttgcctgccttgatgagccgaagaaaccgaaagccggcctcacccgcattcgccgcaatcttttccgccgcggtcgccttagtcgtaagtgataatgtgaagcggattaagcgttcacgcttttccgcttccattgccctctgcctctctttttccttagctttacaaaacaatacttttctcgtggcggaatttcagccaaaaacattgcgggtattcttaaaagggcattaaacattaagattaagagcaatctcacacaaataattatttgaaaatggtttcgctaataaaaatggaataatcaattttaaaaatacgtgattattacgccctattctgctgtagaattcccggcttaatttggccagacggttttgaaccttgctcctttagccgcaaaagccgcagcaagcggggttggtgagcgtgctggaccttttttaggtgcttaaagcttggcgctggttttaaagtaattagcaaagttcgtggttttaagaaatgagagatcggtagcagaagaatataattagataaataatggccaagttgatttaattttgaccgttattgttatttaaatgatttttcctcaactaatcatagcgttattttttaatccctcagaaagaccccttcaaggttcggattttgcctaacttattgcctgtaaataatcggaaaccttggcctctctggcttgacaaggttttaaaagcatccgtaaactcctttaagtgggaatttgtggtgtaaagtggtgaaaagggtcattgaggggtagctcaggtatgtttcgtggggcaacgatggttaacctcgacagcaaagggcggcttgccgtacccacccgatatcgggatttgctgagcgaagagtcgcaaggtcagatggtctgcaccatcgatcttcatcacccatgcctgcttctttacaccttgcccgaatgggaagttatcgaacaaaaattgtcccgtctgtcgagcatgaacccggtcgagcgtcgtattcagcgtttgttattgggtcacgcgagtgaatgtcagatggataacgccgggcgtctgctcatcgtaaacactttgcgacagcacgctgggctggccaaagaagtgatgctggttgggcagttcaacaagtttgaactgtgggatgaacagacctggtatcaacaagtcaaggaagacattgacgctgaacaatcgtctcaggaaccgctttccgagagattacaggacttgtcactataagcatgcttgaaaattacaaacatacatccgtgttattggatgaagccgtaaatgggctgaacattcgccccgacggcatttacattgatggaacctttggtcgcggcggtcattcgcgactgattttgtcacagcttggccctgaaggacgtttattggctatcgaccgcgatcctcaggcgatcgaagcctcgaaggcgattgacgatccacgtttttctatcgtgcatggcccgttttccgagctggcagaatacgtcaaggatcgtggcctggtaggcaagattgacggtattttgctggatcttggcgtatcttcgccgcagttggacgatccggagcgtggcttctcgtttatgcgtgacggacctctggacatgcgcatggatccgagccgtggttattcagcagctgaatggttgatgaaggcagaagccgaagatattgcctgggtattgaagactttcggcgaagaacgtttcgccaagcgtattgcccgcgccatcgttgaacgcaaccgcgaacagccaatgacgcgcaccaaggagctggccgacctgattgccaatgcctcaccgattcgtgagaagcataagcatccggcgacgcgcagcttccaggctgtgcgtatttatatcaacagcgagctggaagagatagaacgcgcactcgacggcgcactcgaagttctggcaaccgatggccgcctgtccgtcatcagtttccactcgctggaagacagaattgttaaacgatttattcgccagcacagccggggaccgcaggtgccatcggggatcccgatgaccgaagcgcagttgcagagtctcggaggacgcacccttaaatccatcggcaaaatgatgccgtcggaggccgaggtggcagaaaatccacgagcacgcagttcagtactgcgttttgccgcgaggaccgcgcaatgataggtaatgagcgtcatggtttggttggggtcattttcagcgacattttgcgcaacggaaagatcccgatgattttgcttgtctcgactctgataagcgctatggcggtcgttacggtatcacataaaacgcgtctgctgacggctcagcgtgaacagctggttttggaaaaggatgcgctggatattgaatggcgcaacctaatcctcgaagagaatgccctcggcgatcacagccgggtagaacgtatcgcaacggaaaaattgcagatgcaacatgttgacccttctcaggaaaccattgttgtgcagcaataaaattattctgctttaaggcttctgccactcggttaaaggcaatttgctcatggagatgacaagcgacagatgaaagcgacacgtgccgcgaagtttaagcgtcaggaagataaagccagctttgtaagctggcgttttgcgttgctgtgcggctgcattcttctggggctgatagggttgatgtcccgcgtcgcctatcttcaggtcatcaaccccgacaggctggtgcgtgagggcgacatgcgttcgctccgcgttcaggctattccaacctctcgcggcatgataagcgatcgcgccggtcgtcctctggcggtcagcgtgccggtaaacgccatctgggctgacccgaaagaggtcaatgagcacggcggtattaccgttgataaccgctggaaagcgctggccgatgcactcaatatgccgctcgaccaactgaccagccgcgttaatgccaatcctaaaggtcgctttgtctatctggcgcgccagattaacccggctatcggcgactacatccgcaagctgaaacttccgggcatcttcctgcgtcaggaatcgcgccgctactatcctgcgggtcaggtcacggcgcacgttatcggcgtgaccaacattgacggtcagggaatcgaaggcgtcgagaagagctttgaccgctggctgaccggccaacccggtgagcgtacggtgcgtaaagaccgctctggccgcgtcatcgaagatatctccaccttagacagccaggccgcgcataatctggtgctcagtattgacgaacgtctgcaggcactggtttatcgtgaactgaacaatgccgtggcgtttaacaaggccgagtcgggcactgccgtgctggttgacgttaataccggcgaagtcctggcgatggccaatagcccctcctataacccaaacaaccttgctggtaccccgcaagagaccatgcgtaaccgcgcgatcaccgatatcttcgagccgggctcaacggtgaaaccaatggtggtgatgacggcgctcaaacgcggtgtcatcaaggaaaatagcgtattaaacaccctgccgtaccgcattaacggtaaggaaatcaaagacgtcgcgagatacccggagctttccatcaccggtatcctacagaagtcgagtaacgtcggtgtttcaaaactggcgttagcgatgccgtccgcagagctggtagatacttactcgcgcttcggattgggtaaacccaccaatttgggactggttggggaaagcagtggcttatatccaaaaaaacaacggtggtctgacatagagagggccaccttctctttcggctacgggctaatggtgacacctctccagctagcgcgagtctatgcaacgattggcagcatgggcattgcccgtccgctgtcgataaccaaagttgatccgccggtctccggtgaacgtgttttccctgaacccctggtgcgtaccgttgttcacatgatggaaagcgtcgcgcttcccggtggtggtggcgttaaggccgctatcaagggttaccgcatcgccatcaaaaccggtacggcaaaaaaagttggcccggatggccaatacatgaacaagtacattgcctataccgcgggcgttgcgcctgcgagtcatcctcgatttgccttggtggtcgtcattaacgatcctcaggcgggtaaatactacggtggtgcggtatccgcaccggtatttggcgccatcatgggcggcgtactgcgcacgatgaacgttgagccggacgccttaccgacggacgtaggcaatgacattgtcaataatcaaaaagaggcttcaggtgacagatcgtaatttacgcgacctacttgcaccttgggtgagtgatgccccgaacacggtgttaaaagacatgacgctcgacagccgcactgcggctgctggcgatctgtttgtcgcgatttctggccatacgagcgatggccgtcactatattcctcaggctattgcgcagggcgttagcgcggtagtcgcagaagcgcagggacaggccgaacacggcgctgtcagagttcagcacggcgtgcccgtggtgtatctggataacctgaatctgctgttgtcggagatagcaggtcgattctatgaacagcctggcgccgcgctgcgtctggttggcgtgaccggcaccaacggcaaaaccaccacgacgcagctgttggcgcagtgggcgcagctgttgggcgaaaccagtgccgtgatgggtaccgtcggaaacggcctgctcaaccgcgtagtaccggctgaaaatacgaccggctctgcggtccaggtgcagcaaatcctgggcgatttagtgcagcagggcgcgacctttgccgcgatggaagtctcttcgcacggtctggtgcagcaccgtgtctcggctctgccctttgccgcagcggccttcaccaacctgagccgcgatcacctggattaccacggtgacatgcagcattacgaagaggccaagtggcagctgttttcgacccacgaaagtgagcagaaaattatcaacgctgacgatagcgtggggcagcgctggttggcaaaactgccggatgccgtggccgtcagcatggaaaacaaattaccggctgactggaaagggcgctggctgtctgcgtcccgcgtgagctatcacgacaaaggggcgacggtcgagctggactcaagctggggcaatggcgtgctcgaaagccgtctgatgggcgctttcaacgtcagtaacctgctggttgcactgggtacgctgctgtcgctgggctatgcctttgacgaattattgaaaaccgcgccgcagctacagccggtttgcggtcgtatggaagtgttccatgcgcccggccgtccgaccgttgtcgtcgattatgcccacaccccgatgcgctggagaaggcgttggcggcggctcgtctgcactgcaccggcaagctgtggtgcgtgttcggctgcggcggtgaccgcgataaaggcaagcgccctctgatgggggcattgccgagcagtacgccgactgcgttgtggtgaccgacgacaacccgcgcagcgaagaccctcgcgccatcatcaacgacatcctttccggcttgctcgatgctggccgtgcgctggcgatccctggccgcgccgaagcggtaaccagcgctatcatgcaggcgactgagaatgacgtagtgctgctggcgggcaagggccacgaagattaccaattggtcggcaaccagcgtttcgattactcggatcgcgttaccgccgcgcgcctgttgggggtgattgcatgatcccggtttctctacaaaaactgaccgacgtgctgagcgctgaactgttcggtaacgacacgcagattgatgcggtgaccaccgatacgcgtcaaatcacgccgggctgcctgtttatcgcccttaaaggtgaaaattttgatgcgcacgacttcgccgccgatgcggtcaaggccggggcggcagcgctcatcgttagcaaacgtctgccggtggaggcgcctcagctggtcgtggccgatacccgcattgcgctgggaaaattgggtgcctgggtgcgtcagcaggttccggctcgtgtggttgcgttgaccggttcttccggcaagacctcggtgaaagagatgaccgcggccattctgcgccagtgcggcaacgtgttgtacaccgcgggcaacttcaataatgacatcggcgcgccgctgacgctgctgcgcctgacccctgaacatgactttgccgtggttgagcttggtgccaaccatcagggcgagattgcctacaccacagacctgactcgtccgcaaaccgcgttggtcaacaacctgtctgcggcgcacctggaagggttcgggtcgctggcgggcgttgccaaggcaaaaggcgaaattttcgacggtctgccggctgacggcatcgccatcattaacgcggacagtaacgactggccgcactggcaggcgcgtatcggcaataaaaccgtctggcgcttttcgcctgacgcggccgaaggcgtcgacttctatgccagcaacgtcactgtaaatgccttcaataccacctttacgctgcactcgccgcaggggcaaatcgatatcagtctgccgctgccgggacgtcataacgtggctaacgcgctggccgcggccgcgctggcgctttctgtcggtgcgacgctcaaggcggtacgtgaggggctttcttcgctacaggcggtgaaagggcgtctgttcccggttcgtctggcggaaggcaaaacgttgctcgacgacagctacaacgctaacgtggggtcgatgaccgcggcggctcaggtgctggcagagatgccgggataccgggtaatggcgctgggcgacatggcagagctgggcgatgagagcgaagcctgccaccgcgaggttggtgaagctattcgtctcgccggtattgataaagttttaaccgtcggtcacttcagtcgcgcaatcagcgatgccagtggctgtggcgaacatcttcaggataaagcggctgtaacggcccgtttagccagcttgttatctgaacacgcggtaattaccgttttaattaaaggttcacgtagtgccgcgatggagcaggtagtacgggcgttacaggagaatgcaacatgttagtttggctggccgagcacttggtcaaatattattcaggctttaacgtcttttcatacctgacgtttcgcgccattgtcagcctgctgacggccctgttcctctcgctgtggatgggtccgcgcctgattgcctatttgcagaagctgcagattggtcaggttgttcgccatgacggtccggaatcacacttcagcaaacgcggtactccaaccatgggcggcgtgctgattctgttttcaatcaccgtatcggtcctgatgtgggcttatccatcaaacccttacgtatggtgcgtgctgtttgtgctggtgggttacggcgtggtcggtttcgttgatgactaccgcaaagtggtgcgcaaagacaccaaaggtctgatcgcccgctggaaatacttctggcagtcggtgattgcgctggtcgtggccttcaccatgtacgcagtgggtaaagatacgcctgcgaccgagctggtggtgccgttcttcaaggacatcatgccgcagctgggcctgctttacattctgctgagctacttcgtgatagtcggcaccagcaacgcggtaaacctgaccgacggtctggacggcctggcgattatgccaacggtgttcgtggcggccggattcgcgctggtagcctgggcgaccggtaacatgaactttgccaactatctgcacattccttatctgcgccacgcgggtgagctggttatcgtatgtaccgccatcgtggggctggcctcggattcctgtggttcaacacttacccggcgcaggtcttcatgggtgacgttggttctctggcgctgggtggcgcactgggcaccatcgccgtactgctgcgtcaggagttcctgctgttgattatgggcggcgtattcgtggtggaaacactgtcggttattttgcaggtgggctcctttaagctgcgcggacaacgtattttccgcatggcgccgattcaccaccactatgagctgaaaggctggccggaacctcgcgttatcgtgcgcttctggattatttcgctgatgctggtgctgattggcctggcgacgctgaaggtgcgctaactatgactgactatcagggtaaaaaagtggtcattatcgggttggggcttacgggcctctcctgtgttgatttctttgtttcacgcggcgtgacgccgcgtgttatcgatacccgtgtcagtccgccgggactcgacaagctgtcggacgccatcgagcgtcatttaggttcactgaatgaagagtggctgcttgacgccgatctgattgttgccagtccgggcatggcgttagcgactccggcactgagtgcggccgctgatgctggcgttgagattgttggcgatatcgaactgttttgtcgcgaagtcaacgttcctatcgtggcgattaccggttcaaacggtaaaagcaccgtgaccagcctggtcggcgagatgggcagggccgcagggtggcaggtcggcgtgggcggcaatattggtctgccagtgctgagtatgctgggccatgactaccagctgtttgtgcttgaactgtcgagcttccagctggagacaactcacagcctgcatgccgcagcggccacgattttgaacgtaaccgaagaccatatggaccgctatccgtttggcctgcagcagtaccgtgcggccaagctgaaggtttatgagaacgcgaaactgtgcgtggtgaatgcggatgatgccctcagcatgccgattcgcggtgcggacgcgcgctgcgtcagctttggcgttgacgtcggcgattaccatctgaatcagcagcagggtgatatctggctgcgcgtgcgcggtgagaaaattttcaatacccgcgagatgccgctgacggggcgtcataactataccaacgcgctggctgcgctggcgctcgccgatgcagtgggtattcctcgagcctcaagcctcaaggcgctgaccacttttaccgggctggcacatcgctttcagattgcttttgtgcacaacggcgtgcgctggataaacgattcgaaagcgaccaacgttggcagtaccgaggccgcattaaacggcctgaaggttgacggcacgctgcatctgctgctgggggagacggcaagtcggccgatttcaccccgttgctgccttacttgcagggtgacaaggtgcgcgtttactgctttggccgcgacggtggcgagctggccgagctgcgccctgaggtgtcttcgctgtttgacaccctggagcaggcgatgcgcgacatcgcaggtcgcgtgcagccgggcgatatggtgttgctgtcaccggcctgcgccagcctcgaccaattcaagaatttcgagcaacgcggcgatgtttttaccgcactggctaaggagcttggctgatgcgtattcgtctacgactgcctggcctcggcctgctgaaaggcatgggcagtaaagccaacgactgggtgatgggcgccaaagagggcgataatctcacgctagtgctttatgaccgcacgctgatgtggatggtgtttggtctggcgattgtcggttttgtgatggtgacctcggcctcaatgcctatcggtcagcgcctggcgaacgatcctttcatgtttgccaaacgtgatgccgtctatctggtcatggccttcatcctcgggctgattacactgcgcatcccgatgatggtgtggcagaaatacagcaatgtgctgctgtttatctccatcatcatgctgattgtcgtattgggcgtcggtagctcaatcaacggggcatcgcgttggatctcactcgggccgctgcgtattcagcccgccgagttctccaagctgtcgcttttttgctatctggccagctatctggtgcgtaaggtcgacgaggtacgaagcaacttttggggcttctgcaaaccgatgggcgtgatggttattctggccgtgctgctgctgttgcagcctgacctcggtaccgtaatcgtgctgtttgttaccacgctggcgatgctgttcctggcgggcgcaaagctgtggcagttcctggccattatcggctctggactgttcgcggtatcaatactggtcgtgaccgaaccttaccgtatgcgccgcgtaacctcgttctggaacccctgggccgatccgttcggcagtggctaccagttgacccaatcgctgatggcatttgggcgaggggagttttggggccaaggccttggaaactcagtacaaaagctggaatatctgcccgaggcgcataccgacttcatcttctcgattttaggtgaggaattggggtatttcggtgtggttttagtactgttaatggtattcttcgtcgcttttcgcgctatgtccattggccgacgcgctctggagctggatcagcgattttctgggttccttgcctgctcaattggcgtatggattagcttccaggcgctggttaacgtaggcgcagctgcgggcatgttgccgaccaagggcctgaccctgccgctgataagctacggcggctcgagcctgctgattatgtcaacggcgctgacgctgctgttgagaatagattttgaaacgcgtctggcaaaagcccaggcgtttgtaaggagtgcccgatgagtggcaagaccaagcgtttgatggtgatggcaggcggcactggaggccacgtgttccctggcctggccgtagcacatcatctgatggcgcaaggctgggaagttcgttggttaggaaccgctgacagaatggaagcggatctcgttcccaggcacggaattgaaatagatttcattaaaattgccggattacgtgggaaaggtctgaaagcgcaactgaccgcccccattcgcatatatcatgcgtggcgtcaggcgaaagccattatgcgccgcttccagcccgatgtggtgttgggcatgggcggatacgtttcaggtccgggcggtttggccgcgtggtcctgcggtattccagtggtgctgcatgagcagaacggtattgccggtttgaccaaccgttggctgtcacgtatcgccaaaacggtattgcaggcgttccccggcgcgtttcccaaggcggccgtggtcggtaatccggtgcgaactgacgtattggcgctgcctttacccgatgcgcgttttgccggacgtgaaggtccgataagaattttagtggtcggcggcagtcagggcgcgcgcgtgttgaatcaagcgatgccggaagtcgccgcgctgctgggcgaccgcgtcactctctggcatcaggtcggaaagggcgcgttagacgccgtaaatgaggcgtatcagcaggccggtcagacgcagcataacgtgaccgagtttattgatgatatggcgcaagcctacgcctgggctgatgttgtagtgtgccgttccggtgctctcaccgtcagcgaaattgccgccgcaggcttaccggcaatttttgtgcctttccagcataaagaccgccagcagtattggaacgcgctgccgcttgagaaagccggtgccgccagaattatcgagcaaaaggattttaacgccggtgccgtggccgacattctggccagctgggatcgtcagagcctgcttgagatggcgcgcaatgcccgcgcagccgccatccctgatgcgactgaacgcgttgccgccgaagtggttgcggcaagcaacaaatgaaaacgagtgactgatggccgtatcaggccgtgagtccgattaacaaaggtttatgagaaacgtgaatacacaacaattggcgaaactgcgtaccttcgtgcccgagatgcatcgcgtccggcacatacactttgttggcatcggtggtgccggcatgggtggtatcgccgaagtgttggctaatgaaggttaccaaatcagcggttcagacctggcaccgaatccggtaacccagcagctgtccgcactgggcgcgacgatttactttaatcaccgccctgagaacgtgctcgacgccagcgttgtcgtggtctcaacggccatctctgcggacaaccctgagctgatcgccgcacgcgaagcccgtattccggtcattcgccgcgccgagatgctggccgagctgatgcgtttccgccacggcattgccgtcgccggtacgcacggcaagaccactaccactgcgatggtgaccagtatttatgccgaggccggactggatccgaccttcgtcaacggcggtttggttaaggcggcaggcacccacgcacgattgggttcgagccgtttcctgattgccgaagcagacgaaagtgacgcgtctttcctgcatttgcagccgatggtggcgattgtgaccaacatcgaagcggatcacatggacacctatcagggtgacttcgagatcctcaagcagacgttcatcaacttcctgcacaacctgccgttctacggccgtgcagtgatgtgcattgacgatccggttatccgcgagctgttgccgcgcgtgggccgtcatgtcacgacatatggtttcagcgaagatgccgacgtgtttatcgaagattaccgtcaggtgggttcgcaggggcactttaccgtgcgccgccaggacaagacgccgattgaggttatgctcaacgcaccgggccgccataacgcgctgaatgccgccgccgctatcgccgtggcgaccgatgaagacatcagtgacgacgctatcctgaccgcgctggcgggcttccaggggaccggacgccgctttgacttcctcggcgagttcccgctcgagaacgtcaacggcaaagaaggcactgcgatgctggtggatgactacggtcaccaccccaccgaagtcgacgcgaccatcaaggctgcgcgcgcagggtgggaggacaaacgtctggtcatggtgttccagccgcatcgctacacgcgcacccgtgacctgtatgacgatttcgccaacgtgctgtctcaggttgatttactggtgatgctcgacgtgtatccagccggtgaagcgccgattccgggcgcagacagccgttcgctgtgccgcaccattcgtgcgcgcggcaagctggacccgattctggtttcagatattgatgcggtgccgggcattctggcacccatcctcgacgccaatgacctgattctggttcagggcgcgggaaatattggcaaggtggctcgtaaactggctgaccaaaaattgcaggcggccaagaagggagatgagcactatgtctaatagcaagactaaagtggcggtactgttcggcggcacttccgccgagcgcgaagtgtctttgcagtctggcgctgccgtactggcgggccttcgtgaagctggtatcgatgcgcacgcggtcgacaccaaaacggtttccgtgaccgctctgaaagagcaaggcttcggcaaggtgtttatcgctctgcacggccgtggtggtgaagacggcacgctgcaaggcgtgcttgagcatctgggtctgccttacaccggcagcggcgtgatggcttctgcgctgacgatggacaaattccgcaccaaactggtgtggcaatcgctgggtctgcctgtttcgcctttcgtggcgttgaataaaaaacagctagaccaggcagggcagggcgctttgcgcgacaaaatcaacgcgctcggcctgccggtcatcgtcaagccgagccgcgaaggttcgagcgtgggcatgagtaaggttaacgcgcctgaagaactcttgccggcgctggaagaggcattccgtcacgacgacgacctgctgatagaacaatggttgagtggtccagaatataccgtcgctatcgttggtgaccaggtgatgccgtctattcgcatccagcctgcgggtgtcttctacgactatcaggcgaaatatatctctgacgagacgcaatatttttgtccgagcggcctgagtgccgaacaggaacaacagctgtccgatctggcgctacaggcttatcgcgcgctggattgcagcggctggggccgcgtcgacgtgatgcaggacagcgaggggaacttcaacctgcttgaagtcaatacatcaccgggtatgacgagccacagtttggtgccgatggcggccaaacaggcgggactgagtttcccgcagctggtagcccgcattctggagctcgccgactgatatgtctcaagctgccctaaatgcacgagagcgaacgacgaaggcagaaacccaaggccgtcgtagtaacggcggtcagctggcgggaatgttgttcctgcttatggtgttggcgaccatcggctggagtgcctgggcggtactgagctggatggacgatgccaagcgtcttccgctgtctgaactggtggtgaccggtgagcgtcactacaccaccaacgacgatattcgtcaggccatactgtcactgggcgagcccgggacctttatgacacaggacgttaacgtcattcagcagcagatagagcgtctgccgtggatcaaacaggccagtgttcgcaaacagtggccgaacgaactgaagatacatgtggtggagtacgtgccggtcgcgcactggaatgatttgcatatggtcgatgccgacggcaagtctttcagtattccggcagaacgtgtcgccaagcagaaaatgccgttgctgtacggtccggaaggcagcgagcaggacgttttgcagggttatcagaccatgagccaacagctggcggcagcgtcttccgtcggaaagtttacgctcaagtcagtttctatgacggcgcgtcactcctggcagataacgctggacgatgacacccgcatcgacttggggcgtgacgatcgcaccgggcgtttgcagcgctttatcgagctttatccgcgtttgcagcagcaggccgatgccgataagaaacgtattagctacgttgatttacgttatgaaagcggtgcagcggtgggatgggccccggcgtttatcgacccaaatggcagtgatggacaaaaagtcggtcagcaaaacaacattaagcagaatcaggcacaggctaaacaacaatgatcaagtcgacggacagaaaactggtagttgggctggagatcggtacggcaaaggttgctgcactggtaggggaagttctgcccgatggcatggtcaacattatcggcgtgggaagttgcccttcccgaggtatggataagggcggcgtgaacgacctcgagtcggtcgttaaatgcgtacagcgtgcaatcgatcaggctgaattgatggcggattgccaaatttcctctgtttaccttgctttatcgggtaaacatatcagttgccagaatgaaatagggatggttcctatttcggaagaggaagtaacgcaggaagatgtagaaaacgtggtgcataccgctaaatcggtacgcgtacgtgacgagcatcgcgtgctgcacgttattcctcaggaatatgccatcgattaccaggaaggcattaagaatccggtcggactttccggcgtgcgtatgcaggccaaggttcacctgatcacctgccataacgatatggcgaagaacatcgtcaaggcggttgaacgctgcggactcaaggttgatcagctgattttcgccggtctggccgcaagctatgctgtattgactgaagatgaacgtgagctgggcgtttgtgtggtagatatcggtggcggtactatggatatcgccgtttatactggcggcgcgctgcgtcatactaaggttatcccgtatgcgggtaacgtggtcaccagtgatatcgcctatgcgttcggtacaccgccaaccgacgccgaagccattaaagtgcgtcatggttgcgcactcggttcgattgtgggtaaagatgaaaacgtcgaggtacccagcgttgggggcgtcctccgcgcagcctacagcgtcagacgcttgcagaggtaatcgaaccgcgttacacggaattgctgaatctggtcaacgacgagattttgcagttgcaggaacagttacgccaacagggcgtaaaacaccatctggccgccggtatcgttcttaccggaggtgcagcacaaatcgatggtctggcagcttgtgcacagcgggtattccatacccaggtacgtattggtcaacctttgaacattaccgggctgacagattatgcgcaggaaccttactactcaaccgctgtagggctactgcactatggtaaagagtctcacctgagcggtgaggctgaagtggaaaaacgcgcctcagtgggcaattggttcaaaagaatcaatagttggctgagaaaagagttttaatgtttcaataacgggatcatagtggagttattggtgatcccgaagcgacaggcacaaaacggagagaaactatgtttgaacctatggaactgaccaacgacgcggtgattaaagtcatcggcgtcggcggtggcggtggcaacgctgttgagcacatggtgcgtgagcgcatcgaaggtgttgaattctttgccgtgaataccgatgctcaggcattgcgtaaaacggctgtaggccagaccatccagattggtagcggtattaccaaaggtctgggtgctggtgcgaacccggaagtgggtcgcaattctgctgaagaagatcgtgaagccctgcgagttgcactcgaaggcgcagacatggtgttcatcgcagcaggtatgggtggcggtaccggtaccggtgcagcgcctgttgttgctgaagtcgcaaaagatttaggtattctgaccgtggccgtcgtgaccaagcctttcaatttcgaaggcaagaagcgtatggcattcgcggagcagggtatcgccgagctgtctaaacacgttgactcactgatcactatcccgaacgataagctgcttaaagttctgggtcgcggtatttctctgctcgacgctttcggcgcggctaacgacgtgctgaagggcgctgttcagggtatcgctgagcttatcacccgtcctggcctgatgaacgtcgacttcgccgacgtgcgcaccgtgatgtccgaaatgggctacgcgatgatgggctctggcgtggcatgcggtgaagaccgtgctgaagaagcggccgaaatggctatctccagcccactgctggaagatatcgacctgtcgggcgcgcgcggcgtgctggttaacatcacggcgggcttcgacctgcgtcttgatgagtttgaaaccgtgggtaacaccattcgtgctttcgcctctgacaacgcaaccgtggttatcggtacttcccttgacccggaaatgaacgacgaactgcgtgttaccgtggtggcaacaggtattggcatggacaaacgtcctgaaatcactctggtgaccaataaacctgccagccagcccgttatggatcaccgttatcagcagcacggcatgtcgccgctgccgcaggagaccaagccagcagcgaaggtggttaatgatccgaacacgcaatcaaacaaagagccagactatttggacatcccggcattcctgcgtaagcaggcggactaaatttctgaatagtccgaattttgggatctccgctctttgtgctaaactgtcccgccgatcttaaggtaaccttaggtcggttggatggataacattgcgagataaaaacgatgatcaaacaacgtacattaaaacgtatcgttcaggcgacgggtgtcggtttacataccggtaagaaagtcaccttgaccttgcgacctgcaccggctaataccggggtcatctatcgtcgcactgacttgaatccaccggttgattttccggcagatgcaaaatccgtgcgtgataccatgctctgtacttgcctggttaatgagcatgacgtgcgtatttccacggtggaacaccttaatgcggcacttgcaggtcttggcatcgacaacatcattgtcgaagttgacgcacctgaaattccgattatggacggcagcgccgcgcctttcgtttatctgttgttagacgcaggcatcgaactcctaaacagcgccaagaaattcttgcgcatcaaagaaaccgtgcgtgttgaagacggcgacaagtgggctgaaatgaaaccttataacggtttcaaattggactggactatcgacttcaaccacccggctattgaaggtgacgccaagcgtttccagttagagttttcggccgagtcttttgttcgccagattagcagagcccgaaccttcggatttgtacgtgatatcgagtatttgcagtcacgcggattgtgcctgggtggcagctttgattgcgcgattgttgttgatgattaccgtgtgcttaacgaagatggtctgcgttttgaagatgaattcgttcgtcacaaaatgctcgatggtattggtgacctgttcatgtgcggccacaacattattggtgcagttaatacctttaagtcgggtcacgcgttgaacaacaagttattgcaagcggtattggctaagcaggaagcctgggaatacgttaccttccaggatgaagctgaagtgccattggcatttaaagccccatctacagtattcgcttaatcggtactgatattacttattacgactggttgttttggcaccctctccggccatttcagccagtcgttctaatgcctttctaagtttctccgggctacggctcgccagtaatcgcaactcatccgcactttgtttactcagttgtcttaccggcggtaagggaccctgagatacgccctgtttttgataatctgcatcatctttctgcgataagttttcagatttagccatcaacgatggattaatcctgatgtcgattgaagacaatgatggtagtatttgcgctcgaagtgcagagagaagcgccggttgttcataacgtaagcgcatcatccagctggcatttgctatctctagcaccaaaacaccctggcgataattacctacccggcaccacggttgcatttgggttggtaacagacctttgacagcgcgattgagcttgagtaatgcggccgcacgttgttgaaccgcacgcagagggctttgccccgcggctgtggcgtcatcgaacaggatatctaataattgtgggcggctgttacgcattgacgagctccggcggattgtaaaacttgtgattggtattctaaatcgttggcgacaatttggcagaaggtatttttggccgcatctcctgttggggatggtcgcggctagccttggcgtgtcgacgaatctttcacaaactgagctggcaagtgtaaccaatacctcctcaagtctaaaccgtttaaatatcggcactcgcggactgaccaatctggcgtggcttcaggcgcatcgccgtgcctcggtcggcgtcgactactggcagcagcatgcgctgcgaaccgtcatccgtcacctttcttttgcactagcgcctcaggttgtgacctacagcgttgccagtcctgaactcgcctctgccgatgccgagccgctgcacgttcagcagatggccctgctggtaactctaaattcgctgctcacccacgaagccaaaccgcctgtcatcatccgtgacacccagcaactgctgctcacggcttctgccaggcatcagcccggactctggctcgcccaggttctgggtacgcgcgccggaccctactcccttcttgtttgattgtcatttctgaagcatctttgccgtttttcgttgcatcagtaggcatggcacacgcctgttcactgtgcgggcaagacccaaagtactaacaaaaatagtagccacaagagtggtctcaaagagaaatcaagaatcatgttaagcaaattattgaccaaagtttttggtagccgtaatgaccgtacgctgcgccgtatgcgcaaggtagttgaccaaatcaatcgtctggaacctgagattcaggcactttcagacgagcagctgcgcgccaagaccgacgaattccgtgcgcgtctggcgaagggcgaagtgcttgaaacgctgatccctgaagcctttgccgtggtgcgtgaatcaagtaagcgcgtattcggcatgcgtcacttcgacgtacagctgctgggcggcatggtgctgaacgagcgctgtatcgccgagatgcgtaccggtgaaggtaaaaccttgaccgcaacgctgcctgcgtacctaaatgcgctgagcggcaagggcgttcacgttgttaccgtcaacgactatctggcacagcgtgacgccgaaaacaaccgtccactgttcgagttcctcggcctgaccgtgggcatcaacctgccaaatatgcctgcaccggccaagcgtgcggcctacgcagcggacatcacctacggtactaacaacgaatacggttttgactacctgcgtgacaacatggcgtttagcattgaagaacgcgttcagcgcaagctgcactacgcgctggtggatgaggttgactccatccttatcgatgaagcacgtaccccgcttatcatttccggtccggctgaagacagctccgagatgtatatccgcgttaacaagctgattccaaaactgatccgtcaggaaaaagaagactctgacaccttccagggtgaaggtcacttctccgtggatgagaaagcccgccaggttcacctgactgaacgtggcctgatcctgattgaagagctgctggctgaagaaggcatcatggaagaaggcgagtcactgtactctccgggcaacatcatgctgatgcaccacgtgaccgccgctctgcgtgcccacgtgctgttcactcgcgacgttgactacatcgttaaagacggcgaagtgatcatcgttgacgaacacaccggccgtaccatgcagggtcgtcgctggtctgacggcctgcatcaggccgttgaagccaaagaaaacgtcgatattcaaaacgaaaaccagacgctggcgtccattaccttccagaactacttccgtctgtacgagaagctggccggtatgacgggtacagcggacaccgaagccttcgaattcagcaccatctacaagctggataccatcgttgtgccgaccaaccgtccaatgcagcgtaaagatttgcctgacctggtctacatgacagagatggaaaaaatcggtgccatcatcgaagacatcaaagagcgcagcgccaaaggccagccaattctggtcggtaccgcatctatcgagaagtctgaagtggtatcccacgaactgaccaaagccggtatcgcgcacagcgtactgaatgccaagttccacgccaaagaggcagagattgttgctcaggccggtcagccgagccgcgtaaccatcgccactaacatggcgggtcgtggtaccgatatcgtgctgggcggtagctggcaggtcgagattgaaaacctgggtgaagatgcgaccccagagcagattgcggctatcaaagaagcctggaacgtacgccatgaggcggttcttgcctcggggggctgcacattattggtaccgagcgtcacgaatcgcgtcgtatcgataaccagctgcgcggccgtgccggtcgtcagggtgatgccggttcatcccgcttctacctgtccatggaagaccaactgatgcgtatcttcgcctctgaccgcgttgccagcatgatgcgtaaactgggtatgaagccgggcgaagccatcgaacacccatgggtgaccaaggctatcgccaacgcacagcgtaaagtcgaaagccgtaactacgatatccgtaaacagctgctcgagtacgatgacgtcgcaaacgatcagcgtcgcgctatctacacccagcgtaacgaactgctggacgtcaccgacgtgagcgaaaccatcgccagcatccgtgaagacgtgttcaagagcaccatcgacagctttatcccgccacagtctctggaagaaatgtgggatgttgaaggtctggaacagcgtctgaagaacgacttcgagctggaaatgcctatcaaggagtggttggacaaagagcctgaactgcatgaagaaacgctgcgtgagcgtattctgcaggtcgctaaagactcttacgcgagcaaagaagaagtggttggcgtggacatgatgcgcaacttcgagaagggtgtgatgctgcaaacgctcgactccctgtggaaagagcacctggcggcaatggactacctgcgtcaggggatccacctgcgcggctatgcgcagaaagatccgaagcaggaatacaagcgtgagtcctttgcaatgtttgcttctatgctcgaatcactgaaatatgaagtggttagcgtactgagcaaagtgcaggtccgcatgccggaagaagttgaagcgatggaagagcatcgtcgcgaagaagcagagcgtctggcacagcagcaacagctgagccacgtcgcctctctcgaagaagaactgtctaccaccggcgaatctagcgttgcttctgaacgtaaagtcgggcgcaacgatccttgcccatgcggttcaggcaagaagtacaagcagtgccacggtcgcctgcagaactaatctactcgtctgacgaataaagacatgaagggcggttaattattgactaattaccgcccttacttttgaggtaaacacagtgactgtgaaaaaagtgaatatcgcggtagggatcatccgcaacgccgacaaggaaatatttatcacccagcgcgacgcctcctcgcatatggcgggcttctgggagtttccgggcggcaagatagagtctggggaaaccgccgaacaggcgttagtccgtgagctacaggaagaggtcggtatcgacgcctctgcccctgagctggtccgcacgttggagcataaattccctgaccgtatcgtcaatctgcacttcttcctggttcaacattggaccggcgaaccttacggcaaagaagggcaacccaagcgttgggtcgctcagcgtgaactgaaagaaagcgatttcccacctgccaacgccgaggtggtaaccgcgttgcagaaaggtgagatttaggacagaaaatagtcgtaagggaggcgtggcgtggcgatgatgccggagcagcctgtgctttcctgtccgcccttgggttcttaacaccgactcggaggcgttgaaaaattggcaaaaaaaatccggagacatggcctgttccggattttctcatcgttcggaccgcttaacggatcctaaagcgggtggcatcaggccttttagcctatttatttgatgtcgtcttcgctccactcgtcaagatcgttaatctcgcctttgcttggaatgcgtttttcttcatcggcccattcgcccaggtcaatcagctgacagcgcttgcagcagaaggggcgatacgggctttgctcgccccaaatcaccgacttgccacaggttgggcagtgtactttagttatctcgttatccatattcagctcctagcagcaggcaagttcaaagttaagtctggccggaacctggcctttttcgctatccaacggcaggaagcgaatggcataacgcgtcttgtgccctgaaatctgaggataaagctgatgttccagagaaaggcgcagtcgaagcaggtcggctccttcggcgttgtcctggaagaaaccgttgaggctggtcaggttgctgaacggcccagactgacgaatcaggtccagaacgcgggtcagcgcacgattcagtggttcaagggtttccagccaatactgtacatctttgtcgcgctgagcctgaggcaggtgcagccagatgtgcagcgtgggtaggtcaaagctacagcagccgccagggatactcaaacgctgtttgaccaggtttatcaggcggtcttctctcagcgcctgaccgatacgtggagcgctcatcagcactgcagcggtatttttcagctctacgcgcaacgcatgaatacgggccatgtctacgccgggcacgtcggcccattgcagcagtttttgctgttggcgttcgagttcttttaacagctcggtgcggacttcgccgcgttccagaacgtctaataaatcagacgcggtgcggaaaaaagtcagggcaggagcgattgtgccgagctgtggattggcgtgtaactgttgtaaaagaaactctatgcgcaaccaggtgcgcattttttcatttaaaggatgttcaaagagaacggtagtaaccacatcactcattcttgtcaatatcctgtcgggtcgctgaagccgctaaatccagatagcggctatgtaatgaagcaacacgcggctcgatcgtctcgggaccaccgttgttatcaataatgtcatccgcacaggccagcctctgctggcggaagcctgtgcggcgataatactttttgcctgctggaggcttacgccgtctcggctgacagtgcgtgcaagctgaatctcttcgcttacgtcgaccacaagtacccgatttgcccgggcttgtaatccattttctacgagtagggaacgacccaaagcacgtaaggcgacgaggcagcctgaattagccgctgcgtttcagcctgtattataggatggaggagttggttaacccattgtttatcatctgcattgctgaaaattatttcgcgcagacgtgggcgattaagcgaactattttcctgaataacttgtttaccaaatcgttcagccagagcaagcagggctggcgtctcgggttcgacaacccgacgggcaataacatcggcgtcaaccagcgtgatgcccagacgcgcaaacgcgttggcaaccgtgcttttgccgcttcctataccgccggtgagggccacaatataactcatgcttttgctcggatgattctgttttgaaaatatcgataccctaaatgataaaggtatcggcagtagatgcaagccaactccgaaggggtttttatcctaaattgaaaccctaaactgtgagtcgcgatgcaaaaccaacccttgccgcgaggctattcctgagtatgataaaaccactggagaaggtgcaaactgttacgtgcttgtcggctcacgccacaggcttaaagcccaaccaggacaatcccatgcgtattgaagaagatttaaaattaggttttaaagacgtcctcattcgtccaaagcgctctaccctcaagagccgttcagaagttgaactcgaacgcacattcacctttaagcattctggccatagctggtcgggaacccctgttattgctgccaatatggacactgtcggtacctttagtatggctgaagcactggcgtcattcggtttactcaccgcggttcacaagcattacagcgtagaacagtggcaggcgttcattacgcttagcagcgagtccgttctgcgccatgtgatggtatcaaccgggacttccgaagctgactttaccaaaacgctgaaaatcctgtcgctgtcgccactgctaaaattcatctgtctggacgtagcaaacggctactccgagcactttgtcgagttcctgcagcgcgttcgcgaagcctgtcccgacaaggttatctgtgccggtaacgtggtcacgggggaaatggtggaggagcttatcctctccggcgcagatatcgtcaaggtgggcatcggtccggggtcggtctgcaccacgcgggttaaaaccggggtagggtatccgcagctttcggccgttattgagtgcgccgatgcggcgcacggcctcggcgggcagattgtcagcgatgggggctgcgccgtgcccggtgacgttgcgaaagctttcggcggcgggcagacttcgtgatgttgggcggaatgctggccgcgcacgacgaatgcgaagggactgtcgtggaggaaaacggcgagaaacttatgctgttctacgggatgagctcagagtctgccatgaagcgccacgtgggaggcgtggcgcaatatcgcgccgcagagggtaaaacggttaccctgccgctgcgcgggcccgtcgagaacaccgtgcgcgatattcttggcggcctgcgttctgcctgcacctatgtcggcgctgagcgtctgaaggagttgaccaaacgcacaaccttcattcgcgttgccgagcaggaaaaccgtctgtttggacagtaaagtgaatgcaacgcccccgttggcaggggactaagacccgcgctgcgccttgaaagggctcggcgctaagtcacagggtcggcggtgcggacgatgaagattttcagttcatcgccgcacccagattaaatatcggcaaatacatcgcaataactaaccctcctaccacgatacccataaacagcatcatcagcggctcgattttctgcgccatattatccgccaactcattagcctgctcggcgtgccagtgcgccagcttttgtagcagggtatcgagcgaccctgactcttccccaattttcactaactggcggcacagggccggaaaacgcggcgaggcgcttagcgctttgtgcagcgggataccctgcgccagttgtcgggtcaactctcccacggcggacttatagtgtaaattactgatggctgattcggccgcgcttagccctgcactcagcgtcatccctgcgtgttgggtcaacaccaacgtttggaaaagctggcacaggcagccgtcactgatcaattttttgaccagcggcagccgcagcagccagccttgctcacgccgctgccacgtctcctgcggatgtaaataatgaaaatagagcccgccgccgcagacaatcaacagcgtcagggcgggcccaaagcgcacaatcgcctccgaggcggtaatcagcatctgcgtaaagcccggtagttctgcgtcaaaagaggcatagatcttggcgaactccggtaacaccatagtcagcatcagcagggtgataccggttgctatcgccatgacaatcagcggataacgcagcgccttcttgaccctcttttgcagtaaaaccacctgctcctgctgcaccgcaagctgttcgcagcagctttcgagctgaccagtcagctcaccgatagcaataatctgcggataaatagccggaaaaacctgtggatacagcagcataaccgccgacagcggctgcccctcgttgaccctttttaccgtctccgccagcacgcagcgccaggctgtcaaaggatggtcaccggcgagcagatttaggctcagcgtcagtggcagtcctgtttgcagcagggtggcaagttgccggataaacgcgatgcgctccttgttcttccagtaacccgcacctatccgttgcgactttttaatgacgatcggctgtagcccgctttccacgagtggggtaagtacctcctgtgaacccgaggacaggctatcaccgcagtgcagttcgccggcgtcatcgactgcctgccacgagaagagatagaggctatggctcaccctggttcccttcgccgattacccgatacagctcgctcagcgaggtgatgccttgctccaccagcaccatccctgaggcgaaaagagtgcgctggtcctgcgagcttgcgatattgcgcagcacctgcgaatctgcaccattaaccagcgcctgctgtagttgagaactgttttccagcatttcataaatgcccactcgaccatagtagccagagaagcactgctcacagcccttggcctcccaaacttgcatcggctgtggcaccgtgtcaggatgacattttatcaacgcctgctggtgggctttgcagtgtggacagagttttctaatcaggcgctgagcaatcaccaggcgcagactggcggcaatctgatacccctctacgcccatttgcgccagcctgactaaggtttcggtcgttgagttagtatgcagcgtcgatagcaccagatgcccggtttgcgaggccttaacggctatctctgccgtctcggcatcacggatttcaccaatcatgattgcatcagggtcctgtctgagcagtgaacgcaggaccttggcaaagcttaacgatgtcttgctgttaatctgcgtctggttaatcccgcgtacgggaatctcaaccggatcttccacgctgcaaatattgcgtcctacggtattgagatgacgcagtccggtatagagcgttaccgttttaccgctccccgtcggaccggtaaccagaatcagcccctggggtttagcgagggccgcgagatactgttgctgctctcgcgcagaaaagccaagctgttccatcgacagctcctgctgcgttctgtcgaggatgcgcagcacaatcttttcgccatacagcaccggcagcgacgcgatgcgcatcgagtagcgctgtttgtcgaaggttaccgacatttgcccatcctgcggcaggcgatgttcggcaacgttaagttggcccataattttgaggcgtgccgtcaggcttgccgccagcgcaaattccggtccgggaagctcctgcaacacgccgtctatcctgagtcgaatacgcagttgattctcgaaaggttcgaagtgtacgtccgacgcccgccgctggagagaaacccgcagcacgttattcaaaaactccaccaccggtataccgctgctttcatcaagattgtggtcctcattttgctgacccgatgcctctttctccccgtgggattctccgcttggctccgcgctcgttcaatctgcgtttgcggccaaaattccagattcaccttcagggcgcaggtaaagcgcagcgccgtcagcagcgcagtggtatcggttgtttgctgatgacacgcgacacgcagattatcttgctcaatgctgatgaacaccgcgccatagtgctggcactgctgtgccagcgtcgtcttcatgagctcaacgttggctttcatccacgcgtgcttttatcgttgaaatgaaagacctgattgcaggcatcgaccatgccttgattacccgcgttggtgcactgacgggaccagtcaatgctgccgtcgagggtgttgataaccggtgtcatgaccaccgtcaggccgcttaacgcctgctggccggtgagcgttatctcgccggacttaacctggactgcgctgacgtagcgtgaggtcttggttaacggaatactggatacgccgttgttgcagggtgccagttcgcctaagtcgatgctgcaaagctcgctggccgtcttgtaaggcaccatggtttgcagcatgtcggtgagcgccgctttttgggtataggactgataggcggggataccgataccgctgagaatgccaataataccgatcaccaccatcagttctattagcgaaaaaccctgctgcagttgcaatgaggctttaaggccgtggtcgttatgtgccgttgggaccggggtaaaaatgacagattgcatgaaactctccattccctgaagggatgtcagcgttgaaagagcgctcaagctaactggcacccatgccggaaaccagcgacacaaggccgtgcttcgcgacgtcacgcaaaaagaaaatgcagagaaggaggtgttacaaaaaatggggagacagctcgcagattgccccacgaagagggcgaggcaatccgccgttgaggcttagcgaaaacgcatcgacaggtcgagtgcacgaacgtgtttggtcagtgcgccaacggagataaagtcgacgccggtctcggcaaattcgcgcagcgtcacgtgagtgacattcccggagatctcaagcagggcacggcctgccgtgagcgccacaccttcgcgcatcatctcgaccgtaaagttgtcgagcatgatgatgtcggcaccggcgtccagcgccagcgtcagttcggacaggctttcaacctcgacctcaaccggaacatcggcatgaatgacccaggcgcgttccaccgcagccttaatcgagccacaggcaataatgtggttctctttaatcagaaatgcgtcggccagccccagtctgtggttactgccaccgccgcaaagcacggcatattttagcgcggtacgcagaccgggcagggttttacgcgtatccagcaggcgggttttggtgccttcaagcagcttgacgtagcggttcactgcgctggcaacgcccgaaagggtctgaacgaaattcaatgcggttctttcgccggtcaacagcagccgggccgggccggaaagctcaaaaaggggttgattttcgaccagcggttcaccatctttaactaaccaggtaatcttgacctcgcctttgccaagctgggcaaacacttcatcgacccagccctgaccgcagaaaatacctgcttcgcgcgtgataaccatggcctgagcctgcttgtctgccggcagcagctgtgcggttaaatctcgattggcatccacctctccgcccaagtcctcgcgcagcgcctgcgcaacaacaaggggaatatcattgtgaatacggtcaagtaactcagcgcgacgactttcaacgctgtagctgcgagtaggcatacaaaactccgaaatggcggatagtgaattataaaaacatgctacccttttgctcaggtaagtaccacgagaacccatcctatgaggtcattaatgcagttaaaacaaggctggatcgctgaagcccgacgggtgatttctccacatttcgatcttcgccccgaggacgagatcccctcgttgctggttattcataatatcagcctgccgcccggaaaatttggcggaccctatattgaccaactttttaccggcacgcttaatcctgccgaagatccgtttttcgaacagatttatcagctttgcgttgccgcccactgtttaatccgccgcgacggtgaaattgtgcaatacgtgccttttgacaaacgggcttggcatgctggcgtctctgtgtggcaggggcgggagcgctgcaatgacttctctatcggcatcgaactggaaggaacggatttcgagccgtttaccgacgcgcaataccagagtttacttcgagttaccgatttgatactaaagcactatcctgtcgatttacagcacatcaccgggcacagtgatattgcgccaggacgcaaaaccgatcccggtccgtattttgactggcagagatatctcgatgcagtgcgggagcaggcagcgagtgatacatcaaaagagagccacccctcatgacgttaattactttgttgctggttttagcctgggaacgtttgttcaagttaggcgagcattggcaactcgaccaccgcttcgaggtgatttatcgccgcggtcgcgccgcctcgttaactaaaacgctggcaatttttatcctctggatggccgtcatctggggaattctgcgtctggttcatggcctgttctttggcgtgccgtcgctggtgttgtgggtggttatctgcctgctgtgcattggggcagggcttaagcgtaagcattatcgcgcctacctcaagtctgcgcgacaggggacgttaacgcctgttccgaaatggccgaagagcttgcgcttatccacggtttgccggtggactgctcggaagatctgcggctgcgtgagttgcagaatgcgcttatctggatcaacttccgctattatctcgcaccgatgttctggttcgtagtgtgcggaccttacggcccagtagctctggcgggttatgcggtgctacgtgggtatcaaagctggctggcgcgtaacacgacgccgcttaagcgcagtcagtcgggcgttgacagtattctgcacgtgctggactggattccggtacgtttggcgggcgtggcctatgccctgattggccacggtgagaaagcgttgccggcgtggtttgcatcactcggcgatattcatagctcgcagtaccaggtactgacgcgcctcgcacagttttcactggcgcgagacccgcatcttgatccggtgcagaccccgcgcgctgcggtttcgatggcgcgtaaagtcaccatcatcattctgattgttgtggcgctgctgactatctacggcaccctggtttaatttaaatttcgcggttgtctgcgggaggttctcctaataccggcatgccgtcgtcgtcccaatctatggtcttcaaccgcgtatggcggttgggatcatacagcggatcgccctcaatctccgcgtagttcctcgcgtgataaaccagtacgtcctcgcctttttcattctgagtaaagctgttgtgcccaggcccaaactgtcgattatcggcatgggtacgaaataccggtttctccgatttatgccactgtgacgggtcattgatatcgctttcgaggtcggcccagagcaggccaatacaataattctcgtcggttgcgctcgcagaataggtgatgaaaatcttgtcataaccctcgatgaccgaaggaccctcattgactttaaagccgatgatttcccagggaagttcgggtttgctgagcatcaccggagcagacttgagggtccacgggttgctcatctcggccaggtaaagatttgaattgccgtcaattgcggggtctttttgtgcccacagatagtaactttttcctgcgtgagtaaagtgggtggcgtccagcgaaaagctgtcgattggcgtcgcgacgcggcctttttcctgccatttgccgctcagtggatcggcatctgagcactcgagtacaaacatacgatgctgaaacagcccgttgacgattttttcagacggcgctgcggcaaaatagatgtaccaattgccgttgatgtagtgcagctcgggagcccagataagggcactcatcggcccgccgccgtgtttacgccagacaacgcgcggacgcgcttccgccagcccttcgagggtggccgagcggcgaatttcgagccggtcatattccggcacggaggcaataaaatagtaatgcccgtcggtatgtcgccagatatgtgggtcagcgcgctgggtgataaaggggttcggataaacagtcttactcatgcttgggctccttgctggcaaaggccggtcgctcggtttcaccctgttttttcccggggtaacccttaagctcgctgcctttgttgagttcagaaaagttgcggcgacgaatctccaaatcggcctgaatcgttttcattagctcacggtcgaccttcagtagtctgactacgcctgcggtcatcagataacccacgcccggaataacggtgaacaacagcacgataccgtttagcgcgtgcggagtctgtgacgcggcacccgcctgatagccataaattgacagcaagaatcccaccatcgcacccgcaaccgccagcccacatttcaggaagaacaggttacctgagaaactaatgccggtgctgcgtttaccggtcttccattcgccgtagtcgtccacgtcggccatcagcgaccagtggagcggggaaggcagctggtggaggatatttagcaagaagtaggccaccagaatcagcaccgtcatgtgcgggtcgaggaaataaaaaccgcaggagaacagcgtcagaataatgttggtccagaagaaaaccttaagcttgcagaatttgtcggtcagcggcttggcgagtgcgctgccaatcatcatgccaatcacgccaaggctgataaacaggctggcaaaggaggttgatttctccatcacccaggtgacgtaatacatcgtggccgccatgcgaatgaagccgggacaaacgttgcagaaggtcagcaacagaatgcgcacccattggtcgttcttccagacgtcttttaagtcgctctttaatgcgtgttttgtcggtacggcgggctggatcctctcttttaccgagctaaagcagaacaggaacatcaccaacgcgatgaaagccattactgcgatggacatttgatagcccgcgccttgtccgccccgccaaaccactgtgccatcggtaataaagaagaggaaagaatcagggtcgcgatgcccaccataaagaagcgataagactgacaggagacgcgctcttgaggatctgccgtgatcactccgccgagagaacagtaaggaatattgatggcggtataggtcagcgacatcaggaaataagtgacgaaggcatagattaccttgttggagtaactccagtccggcgtggaaaacatcagtatgctgaagagcgcgaagggcagggaaatccacagcaggtaagggcggaagcgtccccatcggctttgggttctgtcggcaatcgcacccatgatagggtcactgacggcgtcaaccacgcggatggaaagcagcatgacgcccaccagcgcaggcgcaagcccgaatacatcggtataaaagtagctcaggaaaagggtgatcgtaccccaaatcatgttgcaccccgcatcccccatgccgtatgcaactttctctttaaacgacagcgcgccttgcctcatggactctctccaaaacgggatcaaacgacaataagtgtctgaagtattgacccaggttatgaattcccgtcaggagataagggttatagagatggacaaattggttagaaaaatgaaagtgtgagccagactgcacttcgctgctgcgccaatttagcggcataaaaaacccggcgcggtggccgggttgaatgtcacagactcagagagtggcttacttactgacaatgcctgcggtattgctgttcttgcctctgagcctatagctgatgcccagaatgatcagccataccgggatcagaatgaccgaaatctggatgccgggcgtcaggtacataatcaccagaataccggccaggaacagcaggcaaacgtagttacccaacgggtaaagcaacgctttgaatttcggcgtgaccccttcacgcgttttggcctcacggaacttcaggtgcgccagactgatcatcgcccagttaatcaccagtgcagaaaccaccagggacatgaggatttcaaaggcctcacccggcatcacgtagttaatcaccacgcaaagcgccgttgccagtgccgaaacgccgatagcgacataaggcacgccgcgacggtcaaccttgagcagcgacttaggaccgttaccctgtttagcaagaccaaaaagcatgcggctgttgctgtacacgcagctgttgtagaccgacagcgcggcgataagcacgacggcgttcagcagcgtagcgaccagcttactgtccagggcattaaagataagcacgaacgggctgccgccttcgacaactttgccccatgggtaaagtgacagcagcacggccagcgagccgatatagaaaatcaggatacggtagataacctgattggtggccttaggaatgctcttttccgggttgtcggcttcggctgcggtaatgcccactagctcaagtccaccgaaggagaacatgataaccgccattgccatcaccagtcccttgatgccattcgggaagaatccaccctgcgcccaaaggttggtgactgacgcctctggcccgccgtggccgctggccaacagccacgcgccgaagacaatcatccccacgatcgcgaccactttaaccagcgagagccagaactccatttcgccgtaaatttttacgttggtcaggttgatggcgttgatgagcacgaagaacaccagagcagagacccaggtcgggatctcaggccaccagtactgcacgtagataccaacggcggtcagctctgccatcgccaccagaacgtataaaacccaataattccagcctgacgcgaagccggcgaaattgccccaatatttgtaggcgaagtgactgaatgaacctgcaacaggttcttcaactaccatttctcccaattggcgcatgatcagaaatgctatcaacccgccgatagcgtaaccgagcagaacggaaggtcctgccatttttatcgtttgggcgatccccagaaaaagcccggtgccaattgcgccacctaaagcgatcagctgaatgtggcggtttttcaatccacgcttcagttcttcgccatgctgcctatcactcatttcccgatcctctgtcgtaagggaaaagttaaaattcggcttaaaacagatgctgtaagccgaagattacatgttttgtatctaattatttacggctgcaatgcggcaaaaaatcagcatgaactaccgttcggccaagaatagtgttatgcgaaaaagtttgcacctgctttattgaattagcgcctaagaaacgcgcaaaccgatcaaaaaattgcctcttaagagcaaaatgtgatccagggcacgtttaaaaaagaaatgctaaatatttgttaaaatgtgcgggataagccgttttaagaccggcccgatatggacaccagaggaatactttgttactttacggccacgttttttaaattggtattaccaatttactccgagctcgtcacagaccgaaaaggcagataaacgtccctatggcctacagtaaaatacgacagccgaagttatctgacgcgattgagaagcagttggaatctctgatccttgagggcacactgcgtcctggtgaaaaacttttgcccgaacgcgagttggcgaagcagtttgaggtttcgagaccttctctcagagaagctatccagcgtcttgaaggcaaagggctcctgttgcgtcgtcagggcggtggcacattcgtccagagcaacctctggcaaagctttagcgaccctcttgcagaattactctcagaccatcctgaatcgcagttcgatctccttgaaacccgtcacgcactcgaaggtattgccgcatattatgccgcactgcgagggacggaagaagatttagagcgcattcgtgactgtcacgtagtgattcagacggcacaggacagcggcgatctcgacgcagaagccgatgccgttatgcagtaccaagtggctgtaacagaagccacgcacaatgtggtgctgctgcatttgctgcgatgcatgggaccgatgctcgagaaaaacgtccgacagaattttgaattgctttactcgcgccgcgaaatgctggcgatggtgagcaaccaccgcgccggtatatttgcggcgattgttgcgcgggagcctgagaaagcccgtgaagcatcgcaccgtcacttggcgtttattgaggaagtcttgctggatctgagcagggagcacagtcgtcgtgatcgttcactacgtcgactccagcaacgtaaagaagaaaattaaactctgggtaatcctggctgtctgcatacccatgcccgaggtttgggctccgagaataattttggaagcttttatgctctcccgtgggagcggaaactaaactgacgggcctgtcttcgtgcgttttttgcaccagggcgttgcaagagagcgcaggaagacaggctccagataaaccaacgtattagagacagataaggaaaagcaccatgtcagaacgtgtaaataatgacgtggatccgatcgaaactcgcgactggctacaagcgatcgaatcggtcatccgtgaagaaggtgttgagcgtgcacagttcctgctagaccaggttctgaatgaagcacgtaaaggcggcgtgagcgttgcagctggtgctgcaagccgtaactacatcaacaccatcgctgttgaagacgaacctgagtatccgggtaacctggagctggaacgcaacatccgtactgcaatccgctggaacgcgattatgaccgttctgcgtgcatccaagaaagacctggaactgggtggccacatgtcatcattccagtcttctgccgctatctatgaagtgtgtttcaaccacttcttccgtgcgcgcaacgagcaggacggcggtgacctggtgtacttccagggccacatctctccaggcgtgtacgcccgtgccttcctcgaaggtcgtctgaccgaagagcagatgaacaatttccgtcaggaagttcacggtaaaggtctgtcctcctacccgcaccctaaactgatgcctgaattctggcagttcccgaccgtctcaatggggctgggtccaatcggtgctatctatcaggctaaattcctgaaatacctcgaccaccgtggtctgaaagacacgaccaaccagcgcgtttatgcgttcctgggtgacggtgagatggatgagccagaatccaaaggtgcgatcaccatcgcgacccgtgagaaactggacaacctgtgcttcatcattaactgtaacctgcaacgcctcgacggcccggttaccggtaatggcaaaatcatcaacgaactggaaggcatctttgcgggcgctggctggaacgttatcaaggtcatttggggcaaccgttgggacgaactgctgcgtaaagacaccagcggcaagcttatccaactgatgaatgaaaccgttgacggtgactaccagacctttaaatcacgcgacggtaaatacgtgcgtgaacacttcttcggcaaatacccagaaaccgctgaactggtcaaagacatgaccgacgagcaaatctgggcgctgaaccgtggcggtcatgatcctaagaaagtctttgctgccctgaacaaggcgcagaacaccaaaggccagcctaccgtcattcttgcccataccatcaaaggttacggcatgggtgaaaccgctgaaggcaagaacattgcccaccaggttaagaaaatgaacatggacggcgtacgctacatccgtgatcgtttcagcgtgcctgtcagcgatgaaaacatcgaaaaactgccttacatcaccctggaaaaagactctgcagagtacaaatacctgcacgaacgtcgccaggcgctgaaaggctatctgccgacgcgtctgccaaaattcactcagaagctggaaatgccgaaactggaagacttctctcagctgctggaagagcagaagaaagagatctctaccaccatcgccttcgtccgtgcgctgaatgtgatgctgaagaacgaatcgatcaaagatcgtctggtgccgatcatcgccgatgaagcgcgtaccttcggtatggaaggtctgttccgtcaaattggtatctacagcccgaacggccagcaatacaccccgcaggaccgtgagcaggttgcttactataaagaagacgagaaaggtcagattctgcaggaagggatcaatgaactgggtgcggcttcttcatggctggcagcggcaacgtcgtacagcaccaacgacctgccaatgatcccgttctacatctactattccatgttcggtttccagcgtatcggcgacctgtgctgggcagcgggcgaccaacaggcgcgcggcttcctggtcggtggtacctcgggtcgtacgacgctgaacggtgaaggtctgcagcacgaagatggtcacagccacattcagtcgctgactatccctaactgtatctcctacgatccggcttatgcctacgaagtggcggtcatcatgcatgacggtctggttcgtatgtacggtgacgcgcaggaaaacatttactactacatcaccacgctgaacgaaaactaccacatgccagccatgccggaaggttcggaagaaggtattcgtaagggtatctacaagctcgaaactctggaaggcagcaaaggtaaagtgcagctgttgggctcaggcgcaatcctgcgtcacgtgcgtgaagcggctcagatcctggcgaaagactacggcgttggctctgacgtttatagcgtgacctccttcaccgaactggcccgcgacggtcaggactgcgaacgttggaacatgctgcacccggccgaaaaaccacgcgtaccttacgtggctcaggtgatgaacgacgcaccggctgtggcgtctaccgactacatgaagctgttcgcagagcagatccgtaacttcattcctgccagcgagttccgcgtactgggcaccgacggttacggccgttctgacagccgcgaaaacctgcgtcaccacttcgagatcgatgcatcttacgtggtggttgctgcactgggcgaattggccaaacgtggcgagatcgatgtgaaggttgtggcagaagccatcaccaagtttggcatcgatgctgacaaagttaacccgcgtctggcgtaagaggtaaagacagatggctattgaaattaatgtaccggacattggtgccgatgcagtagaagtcaccgaaattctggtgaaggtgggcgataaagttgaggccgagcagtcacttatcgtcgttgaaggtgataaggcgtcaatggaagtcccttctccacaggctggcgtggtgaaagaaatcaaagttgcggtcggcgataccgtcgagaccggcaaacttatcttcgtgtttgattctgcggacggtgctgcggcaccggctaaagcggaagagaaaccggctgccaaagaacaagcgaaagcagaatcaaaacctgctgccgccgcttcaagcgaaagcaaagaagttaacgtaccggacatcggcggcgacgaagttgaagtcaccgagatcatggtgaaggtgggcgacaaagttgaagctgaacagtcgctgctcaccgttgaaggcgacaaggcctcaatggaagtgcctgcacctttcgccggtaccgtgaaagaaatcaagattgctgcgggcgataaagtcagcaccggttctctgatttttgtatttgaagtttcaggctctggctctgcggcacctgctcccgctgcggctgaaagcaaagcggaagagaaaccggccgctgcccctgctgcgtctggcagcaaagaagttaacgtaccggacatcggtggtgacgaagttgaagtcaccgagatcatggttaaagtgggcgacaaagttgccgctgaacagtcattgatcaccgttgaaggcgacaaggcctcaatggaagtgcccgcgccgtttgccggtaccgtgaaagagatcaaaattgcagcgggcgataaagtcagcaccggttccctgatcatggtgttcgaagtagaaggcgctgcgccggctaagaaagaagaagcggctgcctctgccaaacaggaacagaaagcggcggctccagcgcctgctgccgttgccgagagcaaaggcgagttctcagagaacgatgcttacgttcatgcaacgccggttatccgtcgtctggcccgcgaatttggcgtaaacctgtccaaagtgaaaggcagcggtcgtaaaggccgtatcctgcgcgaagacgttcaggcttacgtgaaagacgccgtgaaacgtgcagaagctgcaccggctgccgctgcggcggctggcggtggtctgccgggcatgctgccatggccgaaggttgattacagcaagtttggtgaaatcgaagaagtcgaactgggccgcatccagaaaatctctggtgctaacctgagccgtaactgggtcatgatcccgcacgttacgcagttcgatgaagcggatatcaccgaagttgaagaattccgtaagcagcagaacgttgaagccgagaagaagaaactcgacgtcaagataacgccgctggtgttcatcatgaaagccgttgccaaggcgctggaagagttcccacgcttcaacagctcgatttctgccgatgctcaaaagctgacgctgaaaaagtacatcaacatcggtgttgctgttgatacgcctaacggcctggtggttcctgtgttccgtgacgtcaacaagaaaggcattgttgagctgtcccgcgagctgtcggttatctccaagaaagcccgcgacggtaaactgactgcctccgacatgcagggcggctgtttcactatttccagcctcggtggtattggcggtacggcgttcacgcctatcgtcaacgcaccggaagtggcgattctgggcgtttccaaatcgtccatcaagccggtctggaatggtaaagagttcgaaccacgtctgatgttgccgctgtctctgtccttcgatcaccgcgtcattgacggtgctgccggggcacgtttcgctgcatacatcggtacaataatgtcagatattcgtcgtctggtgatgtaattgttataaggccggcacgtagccggccttgtttttgacacggatcttgttgtctttcatagatgacaaggttgttgagactcaggtcacccgaagtttgtttgcagatttttaacaattctgtaaacttctggcggtgtatgcgtcccggtggatgatgggcgttgcgtactgcattcgcgaaattacgaatgtgctttaagtaaacgtctgacccgccggacaaacaattaagaggtcatgatgagtacagaaattaaaactcaggtcgtggtacttggggctggtcctgcaggctattctgccgctttccgttgcgctgatttaggtcttgaaaccgttctggttgaacgctattccactctcggtggcgtttgtctgaacgtaggttgtatcccttccaaagctctgctgcatgtagcaaaagtgatttccgaagctaaagctctggaagcgcacggcattgttttcggtgagccaaaaaccgatatcgacaaagttcgtctgtggaaagaaaaagtcattaaccagctgaccggcggtctgtctggtatggcgaaaggccgtaaagtcaaagtcgtgaacggcttgggtaaatttaccggcgcgaacaccctggttgttgaaggcgaaaatggtgcaactaccatcaacttcgacaatgccatcattgccgcaggttctcgtccaatcactctgccattcattccacatgatgacccacgcgtttgggactctacggatgcgctggagctgaaaactgtccctgagcgtctgctggttatgggcggcggtatcatcggtctggaaatgggtaccgtgtatcacgccctgggttcaaaaatcgacgtggtcgaaatgtttgaccaggtgatcccggctgccgacaaagacgttgttaaagtctttaccaagaaaatcagcaagcagttcaatctgatgctggaaaccaaagtcaccgccgttgaagcgaaagaagacggtatctatgtgacgatggaaggtaaaaaagcgccagctgaaccccagcgttacgacgcagtgctggtggctatcggtcgtgtgcctaacggcaaactgctggacgcaggcgctgccggcgttgaggttgacgaacgcggctttatccacgttgataagcaaatgcgtaccaacattccacacatcttcgctatcggcgatatcgtcggtcagccaatgctggcacacaaaggtgtgcatgaaggtcacgtggctgccgaagttatctccggcaagaaacactacttcgatccgaaggtcattccttcaattgcctacaccgagccagaagttgcctgggtgggtctgaccgagaaagaagcgaaagagaagggtatcagctttgagactgcgaccttcccgtgggcggcatcaggtcgcgcgatcgcttccgactgtgcagatggcatgaccaagcttatcttcgacaaagaaactcaccgcgttatcggtggtgcgattgtcgggaccaacggcggcgagctgctgggtgaaattggcctggccatcgagatgggctgtgacgctgaagatatcgcgctgaccatccatgctcacccgactctgcacgagtctgtgggtctggcagcagaaatctttgaaggcagcatcactgacctgccaaacccgaaagccaagaaaaagtaatttctggttgaaggttatagaacggctcctgagaaggggccgttttttttgtgtctgtttttattgagttattgagtgaagtcagtcagtttataacgcctgattgttaggatgggcaaacagcgccttcatatcatccgacatcgcaaagtccatattcagatttttaggcggaaccggctgtaagaaccagcgggtataccacttcgccgcctcgcccgaggtctgtgcactggcaatagtgtcatcaaccaatttctcgaactgtggatcatctttacgcagcatgcagccgtaggcttcacgtgactgagccgtgccgataatctcccagtcggaaggtttacgtgccttggcgcggtcaccggccagcagggcgtcatccatcataaaggccgatgcacgacccgtttccaaggtatggaacgccgacgcgcctccttcctgcgcactgataatgcgcatctgcatctttttatcgctgttcattttattgagcagaatttctgaggtggtcccgccggtcgttgaaacagtcttaccgttgaggtcagagaagtctttgatccccgaacctttcttgaccagcagcttggtcccgacgataaaaatcgtatctgagaaggtcacctgtttttgccgctcagggttgttggtggttgaaccacactcaaaatcatagacgttgttttgcaacagggggatgcgattcggtgaggtgatcgagataaattttacggtaatattttctttattaagacgttttttaatcgcttcaacaatcttggtcgaatactcctgcgagtagcccatgactttatcgccatcgtctttataggaaaaaggcacgttcgactcacggtatcctacggtgatcaggttctgttgatcaattttctttaatgttcctgtgagcgcctcggcctgagcatagccacaaactaacgtcgagcagagcaggagagtgtgaattttcttacgtgacattttccttccttattgatccaaaggtaaaaattgcaccactttcatgagaagtgttatgcaaacctcaggccatgctctttaatttttcatttttgtgagatgtcgcaggcgtggggccgaccacgtaaaaaacagtgtcgaaaagccctttaataaattatggttaatgccttgtggcgggaaccgcgttgaaaggcagaggattgcactgtgctcaacgattcagcaaatattttatgttgcttttttgtgaacgaattaacaagcgcgtcaaaccctgctatgctgccacagcgcaaccggggactgtcgtcgctaagcgttcaggatgtttcgcttcgcctcacacaagacgtgcccgccgtgatccgaccatcggccacattcaaaccccatttccgggtgctgtaacccattgggtcaatagctgattgatgtcggagcccaggcccagcctggacataataaatgacaatgagagcgaggagagagtcgtgctagaagaataccgtaagcacgtagccgagcgtgccgcagagggaatcgtccctaagccactcgatgcttcacaaatggccgcactggttgaatccctgaagaacccgtctgaaggtgaagaagaaactctgctggacctgctgattaaccgcgtaccaccgggcgttgacgaagccgcttatgtcaaagccggattcctggcagccgttgccaaaggcgaaaccacatctccgctggttacccctgaaaaagccgttgaactgttaggcaccatgcaaggtggctataacattcatccgctgattgaagcgctggaagacgaaaagctggcgcctattgccgctaaagcgctgtctcatactctgctgatgttcgataacttctacgacgtcgaagaaaaagccaaggccggtaacgcctacgcgaaacaaattctccagtcatgggccgacgcagaatggtatctcgctcgtccaaaactggccgagaaaatcaccgtaaccgtctttaaagttaccggtgagaccaataccgacgatctgtctcctgcgccagatgcctggtcacgtcctgatatcccactgcacgcgctggcgatgctgaagaacgaacgtgaaggcatccatccggatcagcctggcagcgtcggtcctatcaagcaaatcgaagagctgaacaagaaaggcttcccgctggcctacgtcggcgatgtggtcggtacgggttcatcccgtaagtctgcgaccaactctgtgctgtggttcatggggacgatattccttacgtgccaaacaagcgcggtggtggtgttgttctcggcggtaaaatcgcacctatcttcttcaacaccatggaagatgctggggcgctgccaatcgaggttgatgtctctgacctgaatatgggcgatgtcatcgacatttacccttacaaaggcgaagtgcgtaaccacgaaaccgacgccgttatcgcaaccttcgagcttaaaactgacgttctgctggacgaagtccgcgccggtggccgtattcctctgatcatcggccgtggcctgacgaccaaggcacgtgaagcactgaagctgccaaccagcgatgtgttccgtatcgccaaacctgtcgcaagcagcaccaaaggcttctcgctggcacagaaaatggtaggccgcgcctgtggcgttgcaggtgtccgtcctaacgaatactgcgaaccgaaaatgacctcggtaggttcccaggacaccaccggtcctatgacccgtgatgagctgaaagacctggcctgcctgggcttctcagccgacctggtgatgcagtcattctgtcataccgcggcttatcctaagccggttgatgtgaccacgcaccatacgctgcctgacttcatcatgaaccgtggcggtgtttcactgcgtccgggcgacggtatcatccactcgtggcttaaccgtatgctgctgccagacaccgtcggaaccggtggtgactcccacacccgtttcccaatcggtatttccttcccggcgggctccggtctcgtggcctttgctgcggcgaccggcgtaatgccactggatatgcctgagtcggtgctggttcgcttcaagggtaaaatgcagccgggtatcacgctgcgtgacctggtgcatgccatcccttactacgcgattcaggaaggccaccttactgttgagaagaaaggtaagaaaaacctgttctccggccgtattcttgaaatcgaaggcctgccagagctgaaagtcgagcaggcatttgaactggccgatgcctcggcagaacgttcagccgctggctgtacgatcaagctggatcaggcgcctatcaaagaatacctgagttctaacatcgtgctgttgaaatggatgatctctgaaggttacggcgatcgccgcaccattgagcgtcgtatcaaaggcatggaagagtggctggcgaacccgacgctgctcgaagccgatgctgacgcagaatacgcggcggtgatcgaaatcgatctgaacgagataaaagagcctattctgtgcgcaccgaacgacccagacgacgcacgtctgctgtcgagcgtggccaacagcaaaattgacgaagtgttcatcggttcgtgcatgactaacatcggtcacttccgtgcggccggtaagttgctcgacagccacaaaggtgcgctgccaactcgcctgtgggttgcgccgccgaccaaaatggacgctgctcagctcaccgaagaaggctattacagcgtctttggcaagagcggtgcgcgtgtagagatcccaggctgttccctgtgcatgggtaaccaggctcgcgtggcagacggctcgacggtggtttcaacctcgacgcgtaacttcccgaaccgcctgggtaacggcgcgaacgtctatctggcctcggccgagctggcagcggttgcctccctgctgggacgtctgccaacgcctgaagaatacctgacctacatggagcaggttgataagacagcggcagatacttaccgctatctgaacttcgacaagctgtccgaatataccgataaagctgacggcgtgatcttccaaactgccgtgtaaatcgttatattgcgccacagaataccagggaggcttcggcctcccttttttattcctctattttcatctcatttgtcttaaagccaatcgggagataagaccatggattttgatttcctgcgtgatatcaccgggcaagttaaggcccgtttttcaatgggtcatgaagttatcggccactggctgaatgaagagattaagggcgatctcagcgtgctggacaccatcgaagccgccgctgaggaaatcaaaggcagcgagcgcacctggcagttggtggggcacgaatatacgctctggtttgacggcgaagaagtcatggtgcgcgccaatcagctggatctggaaagcgacggcatggaagaaggcatgaactactacgacgaagaaagcctgtcgttctgtgggatagaagatttcctgctggtgctggaaaagtaccgcgcctttatcattacctaccgctaatcggcaaaaaatcgaataaaaatggccgcagcctcgtgaagaagtgcggccttgtcactgagagaaaatgtcagacctgcggaatatttcttccgtagtagatttcctgcatctccttataaagaagcgtcgtgatctctttccgctcctttgcgctcagctcgtcaggtctggcattaaacaaataatgtttgagatcgaaatccttcagcatcatcttggtatggaaaatattttcctgataaacgttcacgtccatcatgtgatacagcgacttcatgttctctgacataaagttctggatcgagttgattgaatggtcgatgtagtgtttcacgccgttgacgtcgcgggtaaaaccgcgcacgcgatagtcaatggtgacgatgtccgattccaactggtgaatgaggtaattcaaggccttaagtggcgaaatcacgccacaggttgagacctcaatatctgcgcggaaggtacaaagcccgccttccggatggctttccggataggtgtgaacgcagatgtggctcttgtcgaggtgggccaccactgagctcggtaacgggccgggatgctcggaagtatcgacgtctttaggatcaatcggttcttcgcttaccagaatcgtaacgctggcaccctgtggttcataatcctgacgtgcaacgttgaggacgttcgcaccgataatcgaacaggtttcggtgagaatttccgtcaaacggttggcattatattctttgtcaatgtaggcgatatagccgtcgcgatcgtctgcggtcttggcataacaaatatcgtagatacaaaaactcaggctttttgtcaggttattgaagccatgcagtttcagcttttgcaatttagttcaccccttatggatgccgtttcagcgcgaggccgaaagggcattcagtagatactgtggcaaggcaaagctgccgtaatgaatagccggattgtagtaacggctgatgatacccgagtcggcaaaacgcgcctgtagagtgccggtatcaagctgccgatactgcggattattggttgcccatgcgaaggtcatgatcccgccgtaataggttggaatcgctgcctgataaaagctgacgtcctggaaatagtgcgtcaatttctggtggctgttgaccgcctcttcctgctgcaggaagcagacgccgttctgggcaacgaagatcccaccgggcttcaggcagcgggcacagccttcgtagaagcgtgaagtaaacagactttcgcccggcccgatagggtcggtacagtcggagataatcacgtcgaaggtctctgaggtctggttaacgaagttaacgccgtcgtcaatcaccagattgaagcgggcatcgtcataggaaccggcgctatggttagggagatactgacggcagaattcgaccacgcccgcatcaatttcgaccatggtgatgtgttcgacggttttatgccgacagacttcgcgcagcataccgccgtcaccgccaccgatgataagtaccttcctggcgctgccgtgcgccagtagcggaacgtgggtcatcatctcatgatagatgaactcatcgcgctcggtggtttgcaccacgccgtcgagggccatgacgcgtcccagtgcggcgttttcgaaaatcaccagatcctgatgctcggttttgtcgcgatacagctctttttcaatactgaaatactggccgaagctggcgtgcagcgtctcataccaaatttctttctgggatcctgtttgagacataatctcacctttctcctgagtaatcacagccatgaaaaattggcgcattatgatagctaacgaggacgcggcatgcacggtcaaatttcagccataggaaaacatgcaatcgggtgttaaacgagagggacggggctaacaagtgattttagctcacccctgagaaacaggggcgagaaacgagggattaattggtgtaggccaaaagtccaagtgaatcacgcgcgagtgatttgcacttaaccggcttgggcacgctgatgccgctgaggtcgcgatagctatcttcgcccaacgactgcatgtcgaagtcaccgtaattggtgaggtcccaatggttctgctcggcaaaatagacgatcgcgcgttttatttgcgtgtttggaagctgctcgtagccacagttatttttcaaataaacaaaaacggcggttaaatcggccaaatcttcggcttccggctcgctaagggcctgactggcagaggagaatccgagtaaggtcagcaatagcagactgagggtggtttttttcatgctctgccttgtttttgcgggtaaatttaatctttccagtaagccaattttggcgagtagtcgtgtctttagcacaataaaaatattcgtcatagtgatgattaggcccgtaaattatcaaaatgacgttaccatatttgctacagcgctcataaatttcttttacatctcttttttacataatttatatccgcttgaccttaaccctggggaaaggtttaggctgagccattctgcctttcttctgacttcacaaggagcgaccatgtatcgtcgtgattttatcaaactggctgcgctttacgccggcgtcgctgttctccctacctggagccgccaggctttcgcggtcagccgccctgcgttgcccgtgcctgaaatcctccagcctgacgtcagaggaacctatcacctcaccctgcaacaggggcagagccggtttttgccgggcgtcaatactgccacctggggcgtcaacggtaatctgcctgggcccgtgctgcggctgcgtcgcggtaagcaggtcggcgttagcgtgaaaaattctctacccgacgccagcaccgtgcactggcatggtctggctatcccaggcgacgttgacggtggcccgcaggcgatgattgcgccgggcggcagtcgcgaggtgcattttactcccgatcagccagcggcaacctgctggttccatccgcatcctcatcaaaccagcggttatcaggtggcgatggggctggcggggatggtgattattgacgacgatgacgccgataaactgcaaatcccttctcgctggggcgtcgatgatatcccggtgatcctgcaagacaaacgccttaacgacgccggtcagattgattaccagcttgatatcatgaccgcggcggtgggctggtttggtcaacatatgttaaccaacggggtgatttatccacagcacggcgtgtcgcgcggatggctcaggctgcgcctgctcaatggctgcaacgcgcgctcgttgcagattgccgccagcgataatcgtccgctgtatgtgattgccagcgacggcggttttctgccggagccggtgaaggtctctgccttgccgatgctgatgggcgagcgttttgaggtcatgatcgactgttcggacggcaaggcgtttgatctggtgaccctgccggtacagcaaatagggatgacgctggcaccctttgaccaaccgctggcggtattaaagattcagccaaccgtgacgcagtctggcggcagcttgccagattcattgatttcgctgccggctttaccgtcgcttgacggcctgccgacccgctggctacagctcatgatggacccacagctcgaccagcaggggatgcaggcgctgatgacccgctacggtcacggcgcaatggcgggaatgcgcatggaccacggcagtgcgacgtctgacgcgtcttcaatgaacggcatgtcgatggactctggcggcatggcgggaatgtcgatgtcgcagggtgctgctcactttgactttatgactgccaacaagattaacggcaaggcctatgacatgaatcatccggcgtttgcggttaagcggggtcagtacgagaggtggacgatttcgggggaaggcgacatgatgctgcatcctttccacatccacggcacccagttccgtatcctgaccgaaaacggcaagccggtcgaaaaacatcgtcaggggtggaaagacaccgtgcgcgtagagggcggtcgcagtgaggttctggtgcgtttcgaccatctcgccgacgctcagcatgcctatatggcccattgccatctgctcgagcatgaggatacgggcatgatgacaagtttcacggtggcttgattaagcgctgaagaccttgcggtagcatcggctttattgttgcgcaacattctccttgcgcaacgttctttgctatactccccgcgcaataaagactgccatcacccatactgatggcaggactcatttaattttttaggtggcaaggctttatatgaaacacactgtagacgtaatgatttccgagcaggaagtaaaaaaccgtatcaccgaattgggccgtgagatcacggagcattaccgcgacagcggcagtgagatggttctggtggggctgttgcgcggatcctttatgtttatggcggacctgtgccgtgccatcgacgtgcctcacgaagtcgattttatgacggcgtccagctacggcaacggtatgtccagcacccgcgatgtcaaaatcctgaaagacctcgatgaggatatccgcggcaaagacgtgctgatcgttgaagatattatcgactcgggcaataccctgagcaaagtgcgcgagctgttccaactgcgtggaccaaagtcgctggctatctgtacgctgctcgataaacctgagcgtcgtgaagttgacgtgaccgttgagtacgtcggtttcaccattccagacgagttcgttgtgggttacgggattgactacgcgcagcgttatcgtcacctgccgtacgtcggcaaagtcaccatgctggaagagtaaagcagtcgctacccgattgagccatttctgacgtcgacagggcttgataagtaaggcacatcgtggaacgttttaacgcctcagacgttgtaaagtctgaggcgttattgttagtgcggaatttatttcggttgctcaagcagggctgaaacaccccggtgatagcgttgttcaagcatttcgcggctggtagaagtgatgtccagatcgcgcaacagcccgtcctgaagtccgtaaacccaaccgtgcagggtgattttctgcccacgttgccatgcgcttcgcatcacggtggagtggccaaggttataaacctgttccaccacgttgagctcacagagtttgttcagacgatcgtctggctccagctcgcttaacgcgttgccgtgtttgaaatagatgtcgcgaatgtgtagcaaccagttgtcgatcaagcccagttcagggttttcaatcgcagccttcacgccccacagccgtggtggccgcagattatcacatgctcgacctcaagaacgtcgatggcatattgcaccactgacagacagttgagatcggtgtggatgaccaggttcgctacgttacggtgaacaaaaagctcaccgggttcgagtccggtcagacgttctgcggggacgcggctgtctgaacagccaatccacagaaagcggggtttttgagcaagagagaggcgttcgaaaaagccaggatcttcctcttccataatttttgaccaagcagcgttgttgctgatcagcgtttcgatatctttcatgaaagttaatagcctgtaagaaagcgtctacgttggagtaatataagacaactcaaatgaaattcaaaagggttctgttcgaccctaattgtaaacaaagaaataaaacctcggaaaaaggtaagacttcacttatgacatacgctttagaactggagaagttaaccaaaacctacgcaggtggtgtgcaggcattgcgcggtatcgatttacgcgttgaagccggtgatttctatgcactgcttggtcctaacggggccggaaagtcgaccacgattgggattatcagctcgttggtcaacaagtcagccggcaaggttcaggtatttggttacgacatcgacaaggacattgttaacgctaagcgccagctcggactggttcctcaggagttcaactttaacccttttgaaaccgtgatgcaggtggtggtcaatcaggccggttactacggcgttaagcgctcggacgccatctcgcgtgccgaaaaatacctcacccagctcgacctgtggggcaagcgcaatgaacgttcccgcatgctgtctggcgggatgaagcgccgtctgatgattgcccgtgcgttaatgcacgagccaaaactgctgatcctcgatgaaccgaccgcgggcgtcgacattgagctgcgtcgttcgatgtggggcttcctgaaggagctcaacgcgcagggcacgaccatcattctgacgacccactatctcgaagaagccgaaatgctgtgccgcaatatcggcatcatccagcatggccagctggtcgaaaacacctcgatgaagtcgttgctgtccaagctgaagtctgaaacctttgtgcttgatttagcacctaaaagcgctatcccacatcttgacggctatcacagcacgctgctcgatacctcgacgctggaagtggaagtcatgcgtgaacaggggctgaattcactgtttagccaactcagcaagcagggggttcaggtgttgagcatgcgtaataaagccaaccgtttggaagagctgtttgtcgacctggtgaatggcagtgagggtaaaaaataatgtcgcaactctactgggtggcacttaaaagtatctggatgaaagagataaaccgttttggacgtatctgggtgcaaaccctggtgccaccggttatcaccatgtctctctattttgtgattttcggtaatctgattggttctcgtatcggcgatatgcacggttttagctacatgcagttcatcgttccgggcctgatcatgatgtcggttatcaccaactcctacgccaacgttgcctcgtcgttcttcagcgccaagtttcagcgcaacattgaagagctgctggtggcaccagtgccgacgcacgtagtgattgccggttacgtcggcggcggcgtggcacgcggtatctgcgtggggatcctagtgactatcatttcgctgttcttcacccacttgcagatccactcctggtgggtgatcgccgtgacgctgttgctgaccgcaatcctgttctcgctgggcggcctgctgaacgccgtgtttgcgagcagtttcgatgacatcagcctgatcccgacctttgtactgaccccgctgacctacctgggggcgtgttctactccctgacgctgctgccaccgttctggcaggcggtctccaagctaaaccctatcgtgtatatgattagcggcttccgtttcggtttcctgggaatctccgatgtgccgctggtattcaccctgacggtgctggtcgccttcattgcggtgttctatctgctggcctggtatctcatcgaacgcggtcgtggtctgcggacctagctgtgatggcgtctcccgcttgtcggcgggagacgcctttatccttagttttaacctggtgtaatagcctgcaacagctgccgggtataaggatgccgaggttgctgccaaatttgctgatgactgccttgctccaccgactccccctgatacatcaccattacccggtctgcgatatagcgcactaccgccaaatcgtgtgagataaacagcagcgacagctgcctttcctgctttaaatctaccaacagattcagaatttgcgcctgcaccgagacgtctagtgccgacaccggctcgtcgcaaataatcagctgtggattgactatcaacgcgcgagcaatgccaatgcgctgccgctggccgcccgaaaattcgtgcggatagcgctccactgagttggccggtaaaccgacctgatcgagtattttcaacaccgcctgatgatgcgtggcccggttgcccagccggtggacccgcagcggcgtcctgaggatttcaccaaccgtatggcgcggattgagcgaggcgtagggatcctgaaacaccatctggatacggcgtcttagcggcgcaagctgcgaggacgtcagttgagtaatatcctgctcctcgaaattgatgctgccactttttggcgtcagcaggcgtagtatcagtttggacagagtcgatttgccgcagcctgattcacccaccaggcccagcgtctcgcccggcataatctccagcgatacgtccttgaccgaggcggtttgggggctggctgaaggataatgaaagctgactttctccagctttagcaggggacgtccggcattttgaatcgggcgagcgggtacaatgggcggcgtgtaaagggtcgggggagcgtcgagatgatggacaatctccgtcagacgactgctgcggtagtgtgtggcctgactgccgtgcagcgaagcggccagcagccctttgctgtaagcatgctgcgggtgctgaaacagcgccgacttttcggcctcttcaatcttttcaccctgatacataaccgcgacacggtccgcgcgctgttcgaccagcccaaggtcatgagtgataaacagtacacccatgcccaactcctggcgcagtttgtccagcaggctgaggatctgaatctgcaccgtgacgtccagcgccgtggtcggctcgtcggcgatcagcagtttgggttcgcaggctaccgccatggcaatcattaccctttgccgttggccgcccgaaagatggtgtgcatagtcatcgatgcgtttttctgcgtagggaatattgacccactgcaacagctcaatggcccgcacgcgcgctgctttagctgaaagaccgagatgcaggcgcagagtctcgataatttgctggccgatagtgagcaccgggttaagcgaggtcatcggctcctgaaaaatcatcgcgatatctttgccgcgtaattggcgaacgcgagccgcgggcagggcgagcaggttggtgccctgatagagtatttcgccactgaggcgggcattgtctggggcaagccgcatcgccgacagcgcggtaatcgacttgccgcagcccgactcgccgaccagcgccataaactgaccctgctgcacctggagattcagttggcgcacggcggcgtattcaccaaaggtgacaccgaagtttttgaattcgagaagagaggccatgaattatttccccttgctgcgcgggttgagccaattgttcagggcgtcgcccagcagattgagcgccagaatggtcaccgccagcgcactgcccggaataaccgccagataccaggcgttctgcaatgactgtcggccatcgccaatcatgctgccccagctgatacggttaggatcgctgaagccgagaaaggccagcgaggactcagtgagaatcgacgaggccattagcaccgacagggtgacaatcagtgagggcagcacgttgggcagcagttcacgaaaaataacgcgcagcgggctgtagccgaggctgtgcgctgccagcacgaagtccagtgaacgcagctgacgatactcggctcgaaccagccgggcgatcatcggccatgatgcgagtccgatggcgaatgagatataggtgacggtcggttgccccactaccaccagcaccaccaccaatagaaacgacgggaaggtctggaacagttcggcaagacgaacgacaacgcggtctgtccagccgccgaaatagcccgcgctggccccggcaataatgccaatcagcaggctgacgaccaccgcactgaagccgatttgcagcgaaacctgggcaccgtgaaacagctcagacgcgacgtcgcgccccaacgagtcggtgccgagccgatacgcagggtcatcgcctggccacaggaaaggctgtgccaccatctccagcggatcgccgggaaacaaccaggatgccagagcggccattgtgagcacgatcagcagcagcacgctgcccaccaccgcctcgagcgagtgccaaaagcgccgccagcccgagagaccggccggtttttgcgtcaatgcgttagcaagtaaaggatcgactgcacttttcattttttgccctcgatgcgtgggtcaagccagctttgcagtacgtcgaccacaatattgacgcttaccaccagaaacgccgagagcagcagcacgccaaggaccacgttgaagtcgcgtgccacaatcgcctccatcgccagactgccgagtccgggccagttaaataccgtttcgatgaccgccgcgccgcccagcagattaccgaaatacatgccggccacggtggttaccggcatcaaggcgcagcgcaaaatatggcgcaaagccacggtgcgcgggtgcagccctttggcgtgggcggtgcggacaaagtcctgactggcgatttccagcatcgcgctgcgggtgaggcgggcataaatggcgatgaaatagctgctcaatgacaggaccggtagcacggcatggcggagtgtatcgactatcgcgtgccagccggtgagattggcgcctacggtctgactgccgccgctcggtagccagtccagctgcaccgagaacagcagcaggatgaccagccccatccagaaacccggcagtgaatagagcaacagattcagcagcgtgagcagacggtcgggccatttattggcccagaccgccatgatgacgccaaagctgatacccacgaccagcgcgacacactgcgccaacagcatcagcaacagggtattgggcagacgggaaaggatgagcgtggtgacgtccgtgccgtagcgcggtgaatagccgagattaaaatgcgccagatgcgaaagatagctgtagaactggagcagtaccggcttatccagcccatactccgcgcgtagccaggccatattttcggcggttgcgctgccggactggctcgccataacatcgaccacgtcgccgggaaccagctggagaaacaggaataccaccagcacaatccccagcgcggcgggcaccgcctgaaaaagtgcccgacccagcgcgtaaaagatccgggtcaaagattccattgttggccaccgtcccaaaatgacgggcgcagagccgcgtagaagccgttaaccaaggtgacggtgtcgtaaaccggcaggccaaatcgcgcccgaatcaacgcgctgaacggtgcgaggttggtgcattccagtacaaaggcgcccgcattcgggaagcgtttcagcgcagcctcggcggcgctgagtacctcgtcggccagcgtctgccagcttaccgaggtgtcaccttcacggatagaccgcacgaacgccgagcttgccggcataccggcgacggcggcgtcacctgggataccgacgcgggtaagatagtctgctttcagcgttatttcatcgaaagtgaggatcagcggctgacgatgagcgggcagcagctgacgcacggtaacgtactgcaacaggctgctggtgaccaccggcaccggcgaccattcggccagctgttgctgataccacgacagatagccgcagctggtggtcagcccgtcgacgccttcgtcaataagcgcctgcgccgcacgtttgaacggttcgagcagcttgaactcgcccagatgccccatgcgttgaggtactgcctcctccaccaccttatagcgcaccggaaaattccaggtatttgggttgccgatatcgccgtgatagcggcggaaatgcgttttcaccatcagaatgccaagggttgccggtttaacgtcggctctgtttgattgctgactcatcgcgttctccgagtgccgttgttaaggtttagggtcgacccaaaccgacgaaagattgccttctacgccgtctgcggtcggtgaactctcatgaacccgcttgttggcaagggtaataaactgcggtgaagccagcgggatatcgggcacttctcgctgcacaatgtcctgaaactgcctgaattcatcaatgcgtttctgggcgtcgttttcggtttgcgcggcttcgagcagtttatcgactgccggattgttgtagtgagtgatgttggtccagggacgcccagacgatagttcttcgaccagtagaggcgctggacgccgaccgtgggatcgtagagattggcgtactggtcgatggagaactggaagtctcgacgagtaaagacgcgttcggcgtaggtggagatatcctgagagcgaagggtaacggcgatgccgattctgctcagcgccgagcgcacaaactctgcattccggcggaaggtatcgtcataggtgttgtagtcgagcgtcacgcgcagtcgaataccgtcgctgccttgcttgtaaccggcgtcatcgagcagtctgttagcggccgcaaggtcatattgataaggcgagggtgcggcgctgtggaacgctttcaggccgggagcaatcggcgattcggtgggcgtcgcatagccaaaataaaccacccgcagcagtgcttcacggttgatgctgtgggcaattgcctgacgcacgcggatgtctttaaacagtttatcgtcaaggttgaagtaaattgacgccacgctgtagttatagttgtaccccttatagtcaaacaccagatccggcctcttctggagtgtttttagctcgctgagcgcaaccggcgtgcgataacccaggtcggcctgtccggtttgtaaatcaagcgagcgaaccaccggatcggttgaaaacttcacgatcagctgatcgatatacggcttaggcgcgtcccaataatttgggttacgtttatagatgatataactgccgcgaacccatttttcaaagatataaggcccggtaccgatcgggtgattattattttcattttttaacgggtcagtattggcataaatatgttttggcaaaataggtgtttcgccggcggcaaaggcgcgaatcaaataaggtgccggatgactgagtttaaatactgccgttaaaggatcgggggtacttatcgactcgacgttggcaaaagtggctttggcgcgcggatgtgtcttcttcagcaggtcgatggagaaggccacgtcttgcgaggtaaacggctgaccgtcggtccatgtcacccctttacgcaaatggaaggtgtactgtaggccatccgcgcttatgtcccacgaggttgccagctgcggcagcgggttgaggctatagtcgtaggtcagcagtccttcattgaccttgctgctgacggcaataaccggctgtgccaccgtggctaacgccaccagcgccgaaggttcactcggtaatatcagggtcagcgtcccaccttgatgcggcgtgatagtctggctctgcgccgtagcggaaataaacaggatccctagaataaataaagacaaagcacgacttaattgtcgaaataagcgcataacaatagccctttctttgtaatagaagagatgagtatttttaaatcgaattaaaagctatcaaatctctatttttaggactatgaacttaaaagtgttttaaaagcagaaaaatggcaaagggaaacggcagaggtaaataacagcgagatatcatcggacaaataaaaacgggagcacaggctcccgttttttacgcaattttcagcattcaggcaacctgaacgggcaccgcttttgcggtacgtttcagctgattcgcgccttcaaaataggccactttaggctgatgttgacgcgcatcggcatcggacatctgcacgtaggaacaaataatcagcagatcgtcaacgctggcgcagtgcgccgctgcaccgtttaccgagataatgcgtgagccgcgctcggccgcgatggcgtaggtagagaaacgctgaccgttagtcacgttataaatatcgatagcttcgtattcaaggatcccggacgcatccaggaaatcctgatcgatggcgcaagacccttcatagtgtaaatcggcatgcgtcacgtgaacgcgatgtaatttaccctgcagcattgtgcgaatcataattcttacctttaccttcgaagtcagtgatgaatattaaacggttaaatccacttcctgattgtcgatcaatctagcgttgcccagccaggccgccatcaaaataaccgctgatgtgctgtcgaccgacaaatcacgtaacgtttttgcatcgcgaatgaaaagttcgtccggctgaaaaccggcttcgcgcagctgctcggcacaatcggccagcagctcttcaacatgacgttcaccctgagtcaggcgcgtggcgacctgattcataatcttggcaagacgcggcgcgattttacgctcgtcactggtcagatagccgttgcgagagctgagcgccaaaccgtctttggcgcgcacggtcggcacgccgacaatttcgatgtcataccccatatcttctaccaacgcgcggatcagtgccagctgttgatagtctttttggccgaaacaggcgacgtctggctgtaccagattgaacagcttactgacaatggttgaaacgccgcggaaatgccccggacggctggcaccttcgagaagggtcgacagacccggaacgtcgacctgagtttgtgacgcgaggcctttaggatagacctccgccggcaccggagcgaacaccagatcgacgcctcgtttgttcagcttctcgcagtcttcctgcaaggtacgcggatagcgctcgaggtcatcggcgcgctcaaactgcattggattgacaaagatgctgacgatgacaatatccgcccgcgctttggcttcgtcaaccagcgtcatgtggccctgatgcagattgcccatcgtcggcaccagcgcgatgcgctggttattttgtttgaaaaagcgaatctcacggcgcagcagcggaatagtttcaatgattaacacaattatgcctctatctgagttgcaaggtgcttactgaaagctgtgttcaggtccagggtatacgccttcctcaacctctttgacatacaaacgtacggcatcgcggatgtcaccggcctcggcgaggaagtctttggcaaatttaggaatatggccaccggtgatgccaaaggcatcgtgcatgaccagaatctgaccgtcggttgcgttacccgcgccgataccgatgaccggtattgtcagctcttcagtgacgcgacgggccaactcgacgggcacacactccagcaccaggagctggataccggctttttgcagcgccaacgcgtcctgcaacagctgattggccgccgcttcacctcggccctgaaccttataaccgccgaagatgttaaccgactgcggcgtcagccccaaatgaccacagaccggcacggcgcgctcggtcaacgcggacacggtgtcgcacagccagcttcctccttcgagtttgaccatgttagcgccggcgcgcatcagctgagcggcgctgtcgaaggtctgttccggcgtggcataggtcataaagggcaggtcggaaagcagcagcgctttaggcgcaccgcgacgaacgcagcgggtgtggtaaacaatatcttcgagggtgaccggcaacgttgagtcctggccctggacaaccatgcccagtgagtcgccaatcagcatcacgggaataccttgttccgcgaaaagctgggcaaagctggcgtcataggcggtaatggtcgcaaatttgtgtttttcctgcttccattggcgaagttggctcatggtggttgctttcattgtaatttctcagccttataaactgtcaactatcctgttggctattctactggaagctcactcaatcacgtagtctgtttgaggtaagttaaagttacctcacactttaagaaacacttaataagtggcggatatactgaataagcgggcgcagtagcgcggataaagccagggcgaacgatgagaattctactgattgaagacgacaagatgattggcgacggcatcaaagtgggcctcacgcgcctgggatttaccctcgactggttcaccgatggcatgaccggcaagactgcgctcgacagtgcaccctatgacgcggttatccttgacctgagcctgccggggctcgacggcatgcatctgctgcgtcaatggcggcagggaggaaacgatactccagtattgattctgacggctcgggatgcgctggaggatcgcgtcagcgggcttcagtccggtgccgatgactatctttgtaaaccctttgcgctggtggaagtagccgcgcggcttgaggcgctgattcgccgccgacacggacaggtgacgcccaaaattcagcacggcaacgtcgaatttgaccccgcctcgcgtggcgtgagcctcaacggtgagcccgtcgtgctcacctcgcgggaagtctcggtgctggagctgtttttacgcaataaaggccgcgtattacagcgccagctgctgcaggaaaagctctacagctgggatcaagaggtcagcagcaacgccgtcgaggtccatattcatcacctgcgccgcaagctgggcaacggttttatccgtacccttcacggcgtgggttacattctgggtgatgaaaactcgtgaggttatctttcaatttacgcaccctgcgcgcccggttgagaaccctcagcctcaagatgcggctgatcctgctgtttgcggtgctggcgttggtgacctggacagtggcgagcagcatcgcgtggcagcagacccgccataaaattaatcaggtattcgatacccagcagatgctgtttgccaagcgtcttgcgacggccgatctgggcgacaagctggttaaaggtcaggacgtcgacctgcccggtaccaagacgctggtggataaacaccaccgtggacataccgacgatgacgcgctgacctttgcagttttcgaccgagaggggcatatgctgctcaacgacggtgaacacggcaaggcgattcgtttcgacaaaaacgcgcagggattcaccgatgccgaacttaagggggatgacaacagctggcgtttgctgtggctgacctcgaccgacggacgataccgcatcgccgtgggcaagagtacgattaccgcagcgatatggcgtgggacatggtgagcggtcagctgctgccttggctggcgtccttgccggtgctgatgttggccatgattgtcatgttgacgcgtgagctgcgtcctctgcggcgcgtggcgcatgatttacagcatcgtgccgccgacgaggcgcaaccgctctcgaccgaaaaaatccccggcgaggtcatgccgctggtgcagtcgctgaattcgctctttgcccgcacgcaggacatgctggtgcgtgagcggcgttttacctcggatgccgctcacgagttgcgcagtcctctggccgcactgcgggtgcagacggaggtcgttcagctggcgggagacgataagcaggtgcgcgagaatgcggtgaaaaatctgaccaccagcatcgatagggccacgcgccttgtcgatcagcttttgaccctctcgcgccttgaatcctttacctcgcttgatgacctgtcgccgattgactggcccgagctagtggcgcaggcgctgatagagcaggacgcaaccgcgcatcgcaaaggcgtcgagttgatactggaacaaaagggtacgccgccgccgatgcgtggacagcctctgctgctctctctgctggtccgtaatctgctggataatgccattcgctattcgccgacgagcagcgcagtgcgcctgacgttatcgcctacgggcctgtgtctcgaagacggagggccagggctcactgcggatcacttgtcgcgtctgggagaacgtttctaccggccaccgggacaggagcaaaccggcagtggacttgggatttcgatagtccttcgcatcgcacagttacacggtatcagagtcacctatgccaatgcacccgagggagggctgcgcgtattgctgacgttttaaaacagacgccatccacagggtgcgccgagtgaggcggtgctagccttatgttctaacgcaaattttattcccgagcttctgctagagttacaggtacggattttaaaacgtcttttatccatactttttaagtaagagactttccaacctggaagggtattgtttatggttacacgacgtaactttctcgcttatacctcattttcgatggccctcgcggcgctggggctgacgccggaggcgctggccgcacaacggttaaaacttggcaaggtcagcgcattcagcttcgaatggctggtccagctggccgaaacgcaggcaaaaagtccgtttatccccccgaaacggtgcccgaaaatatcctggccaacataaattacgacatctaccgaaaaattatttataaccctgactatgcgcttttcggcaaaaccgcgagccgcttcccggtgactttttttagcgttagcggtctgcatcacacgccggtgaaaatgtcggtggtggaaaaccatcttgcgcaggaaataattcaggacattggttacttcagtctgcccaacaagacgccgggcgttttacctaaaattaaaggcaatgtgtttaccggttttcgcgttttggagaatcaacaggtattagaaacccatcccgacaaagactgggtgtcgtttctgggggcgtcttattttcgcgcggtaggcgagctggggcagtttggtttatcggcgcgtggcattgccatcaataccgtctataacggcgagccggaggagtttcccgactttacccatttctggtttgaaacgcccgaaggtgacagtaatcgtctggtggtttatgcgctgctcgacggacccagcatttgcggcgcctatcgttttgttctgcaacgtaccaagggcgtggtgatggacgtcgattgctcgctgtttttacggcgtgacgtcggacgatttggcatcgcgccgcagacctcgatgttctggttctcaaagatagctaaaggctcggcctccgactggcggcctgaggtgcacgactcggatggattagcgctctggaccgggcacggtgaacatctctggcggccgctgaataatccgctgcaaatacaggtctcggcgttcagcgataacaatccacggggctttgggctgatgcagaaggagcgtaattttaacgcctatctcggttcggtcggctatgagcgtcgccccgacctgtgggttgaaacgcgaggcgaatggggcgaaggctcggtccagctggtcgagatcccgaccgacgacgaaatctatgacaacatcgtcgcgatgtgggtgcccaaagagcctgccgttgcggggagtcagcatcagttcagctatcgcctgcactggctggccgacgagccctttccctcatcgttggcacgctgtggcgcaacgcgcctgggcagaggcggtaatccggggcatatccgccgtcaggcgtgcgcaaatttatgattgaattcagcggaaaggtgctggatgaacttcccgtcgacgccaaacctgaggccgtactgtgggcttcacgcggtagcttcgacggcgttaaggtcgagaagtctccgggcgacaacaagcgatggcgtgcgttctttgatttgcattcgcagggtaaagaaccggtcgaactgcggctgtacctgaaaaacgcggagaagacgctctcggaaacctggatttaccagtatctgccgttcgagtcttctccgaggccgttacagggaatttagcatccacggcacggggttgatgatgatgcaaagatttaacgcagagattaccagcgaaccagcccgttgatgggcacgcgggtgagaacctgttgcaaagactcgccgtcggggaagagaagttccggggcgatttctgccagcggataaagcatgaactcgcggttcttcatgtcgtagtgcggcacggtgagacgctcggtggcataaatctcgttgccgtaaagcagcatatcgagatccagtgtgcgcggtccccagcgttcggctttacgcacccggccctgattttgctcaatcgcctgagtatagtcgagcaactgatgggctggcagctgagtatccagcgcgaccacggcattgagataatccggctggtcctgcgggccaagcggtttactgcggtaaaaagaagaagcctgaaccaggtgggtacgaggaatgtgcgccagcgcctccagcgcacagttaacctggtctacaggctgggcaagattactgcccagcgcgatgtagacccgaatcattgaccgctacccgcgcgtggtgcacgtttgcggggacgacgtgtgcggttacggcgcggtggcgcgtcatcgcccagcgtgcccagcatgttcttctgcgacgccggtgtcgcctcctggaactcgctccaccattgcgtcaggctttgcagctcacgatgctgctcaacttcggcgcgcagcgccagcaggtcgaatgcagcgcggaacttaggatgttccatcagcttgtgcgcgcgcttgccttgacgacgagacagacgcagttgcagagaccagatatcgcgcaccagcgtagtgatgcgttttggaatagccagagaacggcactgctcgtcgagcacgtcgttcatcgccagtgagaaggcgtcgtaataagtcagtccgccttcctgcgccagtttctgcgcatgttcgataaccggataccacagcatcgccgcgaacaggaatgccggattcacccgcatgtcgttatgcagacgatggtcggtgttcttcagcacctgatccagaatgcgttccatcgggctgtcaccgccctcggtgaactggcgggcaatcagtgggaacagtggctggaacagctgatattcacgcagcagctcagcggttctgaaaccgtagcccgcttgcagcagcttgagggattcttcaaacagacgcgccggaggaatttcctgcaacagggtcgccagacgaggaataggctcggcggtttccgggctgatggtcatgtccagcttggcggcgaagcgcacggcacgcagcatacgtaccggatcttcacggtaacgcgtctcaggatcgccaatcaggcgaatcacgccttctttcaaatctttcaggccgccggtgtagtcgcgcagcgtaaagtcagaaattccgtagtacaggctgttaatggtgaagtcgcggcgctgagcatcttcttcaattgaaccaaatatgttgtcgcgcagcagcataccgttctgagcctgctgggaaagattcttgtcgtcggtttcctgcacctgttcgtggtgtccacggaaggtcgctacttcgatgatttccgggccaaacatgacgtgggccaaacggaaacgacggccaaccagacggcagttgcggaacagtttacggacctgctctggcgtcgcgttggtggtaatgtcgaagtctttcggtttcttgtgcagcagcagatcgcgaacgccgccgccgaccagataggcctcataccctgatttattcaggcgatagagcaccttcagcgcgttatcgctgatgtctttgcgtgaaatatcgtggccgtcgcgcgggataatcgtcatgtcgccagacgatacatcgctttgtttgctcacgtgtttttgctgtggctgctccgtgcgcggcgattgacgcggtgcagtgcgtctttcacgaacttctggcgctttagccttcacctgttcaacgtcaggggaagtaatgggatcgcggtggcctttatcatcatgaacgggcgtctcttcacgactgattttatcttcacgaactagcaccttacggcaaaaattggctactcgggtaaaaatggtacacctcgatagtgtcggataaaaatggcgcaacttaaaaacagcggctaatcatagctcacacgggcaaatcgtggaactttttccaacgaccaatgcgttactgcccagcgtaataataaaggcaaagttaaatcctgccagctttctggtacagattgccctaaaaataacattgtttgcacaattaccggccgcggatcgccgtcgggtagcgctggagcatgattttgcttggagagtttgtcgccgttggcattaagtgccaaaggtaaatgaacgtaacctggcgctggcagacccaaatgctgatacagcgacagttgtcgcaccgtcggcgcaatcaggtcagcgccgcgtacgatatggttgacgccctgaaaatggtcgtcgatcaccaccgccagattataggcaaacagcccgtcgcggcggcggataataaaatcttcttctgccagtccggcatcagcaataaattcgccctgtagctcgtcgtgaaagcgctgaaccggcaaggtttgatgcaaacgaatcgctgcattctccgggccatgccctgcacaacggcagtggccgtcataggtgccaccgagctgagagatacgttggcgcgtacaggtgcagtaatagcttttaccctgctgatgcagccatgccagcgtttctcggtaggcctcgtgtcgctgtgactgccagaccacctcgccgtcccactctagcccgtactgctcgagcttggccagaattcgacttgcgctgcctgggacttctcgcggtgggtcgaggtcatcgatacgcacatgccattgtccaccctgtgaacgggcgtgcagatagctaccgagtgcggcaatcaatgaaccaaagtggaggtcgcctgaaggcgaaggagcgaaacgaccgatatagggagatgagatagacatggcgaggagagcgcggtgtgcaaaaacacaccgcgtgagttcccgtaacttagccggccatctgcttttcgcggatttctgccagtgttttacagtcgatgcacaagtcagcggttggacgtgcttcaagacggcggataccaatctctacgccacaggattcacagaaaccgaaatcctcgtcttccacttttttcaacgttttctcgatctttttaatcagcttacgctcgcgatcgcggttacgcagttccaggctgaactcttcttcctgagtggcacggtctgccgggtcagggaagtttgctgcttcttcctgcatgtgcgtaacggtacggtcgacttcatccctgagctgattgcgccatgcttcaagaatctttttgaagtggtccagctgggcgtcgttcatgtactcttcgcctggcttctcttgatacggctccaccccagcgatggcgagaatgctcagggacgaggttttacgggttttcccttcttgcatgatgcttctcctacataacacgcactatcgatccccaacgggggaaaaaatcaggccgctataaataccagaaggtggcgaggttggcaattattcatcacagcctattgacaagcctgtgagagaaagcgtattcgcgaccagcggttttggctgctgacgacttcaatttgggtacatcacacatcgattaataaacaggctatcgacctggaatgaccaacggtagccgctctgtgagttgcattccctcagcagagagttcggcaccataacacatcacttcgacaccgttttcctgcacctgcgtcaataattctgcgtagcggggatcaatatggtgtgccggagccacactttcaatgcctgaatgcaatactgcgaaaaaaagtatcgttcgtttaccttgttccgccattgattgcagttcgcgtaaatgtttctgaccacgcagcgtcactgcatctgggaaataaccacatccttgttgcagcagcgtgacagattttacttcaatatagcattcgggacggttttccgcctgcaataacagatctatacggctgttctctgtgccatagcgaacctcagcgccgagtttactgtaaccggataattcgggtatgcgctgttgctcaattgcttcccgcacgagctggttggcgcgcagagtgttgacgcagatccaatgcccgtcctgcgtttcagacaattcccaactgtgggcatactttcttttcgggttatctgacgtggaataccagacggtatcaccgggcgttgcgcatccggtcatggcacccgtattcgcgcagtgtagcgtaagtttgcgcccatcggcggtgacgacatcggcgagaaaacgtttgtaacgtttgataagcgttgccggttgaagcggcggaaagaattgcatcaaatcggctctctgattagcaagggatgacgcgaccaacggccagctttgcaggcactgatagcgggtgcgtccctgatgatactgggactcgtaaagactgaattcgttagcatcgagctgccactcaggcgtcgaggcgggcaatgccaccggacgcgttgcgccgcgcagcagggaaacgtggggatgaaacggcagcgttgactgataacaaccgttgcgcgcagcgtgtgagcgcagcagggaggccagttgcaggagcgcaagcggtgcacgtcgagtgcctagccagacaacgcccgggcgcggccagtggcccaggtcgtcaagcgttaaactaaacgtcggtgacgttatgcgggaagcaatcccgctcagcaccctggccttagcgtcgctgacgtcgcccagaaaggccagcgtcagatgaagattggccgccgcaacaggacgccccgcctcggcctcaaaactgtcggcgcgccactttatcacctgcttttgcagcttggtcggcaaaggaagggcgaaaaacaggcggcgtgattcagacatgatttttccttgagggtaaggttactgaacgcggctacataccggcagtaaggctaaatgctacaattcatcccggtctgcgacaattttttctattacaatgccggccctgaatactgaatcatcaatggagaatctgtgtctttactgcccgtcggtgccgttttgaaccaagttattgccgcgctgcaacaggcgcagcaggtgttattgcatgcgcccaccggagccggtaagtcgacctggttaccgttgcagattcttaagtccggcctgtttccaggaaaaatcttgctgcttgagcctcgcagactggcggcaaagagcgtggcctatcgtctggcgcagcagcttggtgaacaagcggggcagactgtcggctaccgcatgcgcgccgaatcaaagaccagcgcggagacgcgcctcgaggtggtcaccgagggaattttaacccgcatggtgcagcaggaccccgagcttgccgactactcgctggttgttctcgatgaattccatgaacgcagtttgcaggccgaccttgcgctggcgctgctgctcgacgtgcagcaggggctgcgtgaagatttgcggttgctgattatgtcggcgacgctcgacaacgcccgcctgtcgccgctgctgcctgacgcgccggtcattatctctgaaggccgcagttttccggtcgagcgccattatctgccgctcgccagtcatgagcgtctcgacgaaggcgttgcgcgtatcgtcagccgtctcatggccgagaatagtggctcgatgctgctatttttacccggcgtggcggaaatcactcgtacgcaaaatctcctgaccggacggctgagcgacgacgtcgatctctgcccgctttacggtgcgctttcgctggaacagcagcagaaagcgattcaacctgcgtcgaccggtcgtcgcaaggtggtgctggcgaccaacattgccgagaccagcctgactattgaaggcattcggctggtggtcgacagcggtctggagcgcagcgcgcagtttgacgcccgcagcgggctgacgcggcttgtcacgcaacgcatcagtcaggcggcgatgactcagcgtgcagggcgcgctgggcgtctcgagccgggactgtgctggcacctgttcagtaaagagcaggccgagcgtgccgctgcgcaaagcgaagcggaaattctacaaagtgatttaagcggtctgtggctggagctgttgcagtggggatgtcaggatgcttcgcagctgacgtggctcgacgcgccaccggctatcgcgctcaaggtcgcgcagcggctgctgagctcgctgggcgcgatagacgacgagggcaaacttaccccggtcgggcgttctatggcacagattggctgcgaaccgcgtcttgcggcgatgctggtgcaggccgagcgccagggggctgacgcgctcgccaccgcggcgctgctggccgccattattgaagaacctccgcgtgggggcagccggatatcgactactggcttagccgaccgcagccgcactggcagcgtcgtgcccgtcagctcagtcagcgactttcgcgcagcggcggacaggttgatgcctcgcttgcccctggctgctggcctcggcgttcagtgaccgtatcgccgagcgacgcgggctcgatggccgttatcaactcgcgaacggtttgggcgcctcactggcgcaggacgatgcattaacccgcgctccctggttggtcgcgccgcagctgttgcagggcaataacagccctgatgcacgcattctgctggccatcacgctggacgcttctcagcttgccgcgcggctacccaagattgttaaagagcagaccgccgtcgaatgggacgaagaaaaagggaccctgcgcgcgtggcgacgctggcaggttgggcgtctggtgttgaaggcgcagccgcaggctaaaccggcggacgaagacctacagcaggcgctgcttgagtgggtgagagcgcaggggcttcaggggctgacctggtcaacggcggccgaacagctgaggattcgcctgatgtgcgccgcgaaatggctgccggaaatcagctggccagcgatggatgacgcaagcctgctcgataacctcgagcagtggatgctcccgtcgctcaacggcgttcgcagcctgcgtgcgttacagcagattgatttggcagaggcattgctgcgcctgatgagttgggatcaacgtcagcgtcttgacgctaatttacccacccattacagcgtcccgactggcagtcggctggcaatccgctatcatagcgaccagccaccggcgctgtcggtgcgtttacaggagatgtttggagagcaacgcagcccgatgctggccgaaggccgcgtcgccgtggtgctagaactgctttccccagcacatcggcctttgcaaataacccgtgatttggccgccttctggcagggctcctatcgcgaggttcaaaaagagatgaagggccgataccctaaacacccgtggccggataatcccgccgaggcgttacccacgcgtagaaccaagaaatacagctgaattttcagacctttcttctatgcaggatgaaaggccaggaacagagtaagcgccagtttcgacacagctcttattttaaaaaacatttttcaaataaccgcagtaaatagcatccggcatttttttataagtcgggtctgatggagattaagtatgtctggcgatgatcgcgagccgattggccgtaaaggcaaaccgtcaccccctaagcccaagcgcgggcgcccgtgcgccgtagccgtgacgacgaagaagagacccgttatagctatcagggcgatgatgaacaggacgatgatgacgttagtagaaatgcagcacctcaggagtcacgcatgactccccgtaaaactgccaagggcggcaaggctggcaacggcaagaagccgcgtaaaaaacgccgctggcttggtctgctgatcaagctgtttatcatcttcgtggtattgatggccgcctggggcgtttatctcgactccgaaattcgtgggcgtatcgacggcaaagtctggcagctgcctgccgccgtctatggccgcatggtgacgctggagccgggcacgccgtatactgaaaaagagatgattaacctgctggaagggacgcagtatcgtcaggttacgcgcattactcgtccgggcgaattcagcgtgaagggcggcaatatcgatttgctgcgccgcccgtttgacttcccagatggtaaagaaggtcagatcaacgcgcgtctgattttcaaaggcaatcagcttgccgaaatcaagaacatggacaacaatcgcgacttcgggattttccgcctcgatccgcgtctgataaccatgttgcagtcgccaaacggcgagcagcgcctgtttgttccgcgttccggcttcccggatttgctggtgcagacgctgattgccaccgaagaccgccacttctacgagcatgacggcatcagcccatattctatcggtcgtgcgttcgtggctaacctgacggcaggacacgcggtacagggcggcagtacgctgactcagcagctggttaaaaacctgttcctgaccaatcagcgcaccctgtggcgtaaggcgcgcgaagcctatatggctatcctgatggacggtcgctacagcaaagaccgcatccttgagctttacctcaacgaagtgtatctgggccaaagcggttcagatcagattcgtggtttcccgctggccagcctttactacttcggccgtccggttgacgagctgagccttgaccaacaggcgctgctggttgggatggtaaaaggggcttcgctgtataacccgtggcgtaatccgaagctagcgctcgaacgtcgtaacctggtgctgcgtttgctgcaggagcaggggattatcgataaagagctgtatgacatgctcagcgcgcgtcctcttggcgtgcagccgaaaggtggggtgatttcaccacagccggcgttcatgcagatggttcgccaggagctacagcagaaactcggcgataaaattacctcgatgtccggcgtgaagatcttcaccaccctggatccgatcgctcaggacggcgcagagaaagcggtagaagaaggtattcctcttctgcgtaagcgcagcggctttaacgacattgaaacagcgatggtcatcgttgatcgttacaccggcgaagtgcgtgcgatggttggcggagcggaaacgcagttcgccggcttcaaccgtgcgatgcaggcgcgtcgtcaggtcggctcactggctaagccagcgacttatttgaccgcgctgagtgatccgaacaagtatcgtctgaacaccgtacttgccgaccaaccgctgtctatcaaactgtcgaacggccagacctggtcaccgcacaacgatgataatcagttccgtggtcaggtactgttggtggatgcgctggcgcgttcgatgaacgtgcccaccgtgaacctcggtatggcggtcggactggacaacattaccaagacgctgatcaacctgggtattcctaaagagtcgttgagccagacgccatctatgctgctgggtgcgattgccctaacgccgatggaagtggctcaggaataccagacaatcgccagcggcggtaaccgggcgccattgtcggcggttcgctcggtcattgccgaagacggcaccgtgctgtaccagagctatccacaggcggagcgcgttgttccctccgaggcggcttatctgacgatgtacgcgatgcagcaggtggtggcagaaggaacctcacgccagctggcggtgaaatatccgaagctgcatctggcggcgaaaaccggtacttccaacgaactgcgcgacagttggtttgcagggattgacggtaaccaggtggcgattacctgggtaggacgcgacaacaacggtccttccaaactgtggggtgcgaccggtgcgctacagctttacagccgttatctcggcaacatcacgccaatgccgctggacctgcaggtcccagacgacgtgagcatgatgaacatcgatgacagcggtaactttatctgtaacaacggcggcggtgtgatgaccggcggcgggttgcgcgtgattcctgtatggaccgacaatgctcagcagctgtgccaggcctctcaggcggcggcttatcagcagcagcaacagcttttgcagcaacaacagcagcaacagcaacagggccaaccgcagggtcagccgcaacagcagcagcctcaggacaatcaaaaggacagcaacggtgttgcaggctggataaaagacatgttcggctcaaaatagggctgacagggctattttaggccaagtcattaacagcaacttcctgatttataaagcgcgatgaaaatcgcgcttttttttattctttttccgaccggcccttacggctttacttatcaggtatcaactgcttgcttgaccctaaacattgcagggacggctttaatttgcccgcaggccgccaaaagtaaatgcccttgcagtttccttaccgttccgcatatcatgcgatgtttataataataattatcgtttctattcccattcaaacatctccagagaataataatggcacttatgcgtacgtcttcagtgaaaaactgcccaatactttttattcctaacaaactcgcgttaaccgtggccgccgcgttagcgggctttgcttttcaggcttctgccgcccaaaccacggccaatgcgtcaaaaaacgacaccatcactgtggttggcgatagcgcatcgaacgtggttcaagagtctgcctggggacctgcgcccactatcgtagccaaacaaagcgcgacggggaccaagaccgatacgccaatagtcaagacaccccagtctatttcggtcgtgacccgtgaagagatggacacgcgccaaccgaccacggtcaaacaggcgctgaactatgcgccgggcgttttcgccagccgcggtagctcaaacaccatcgacgcggtcgaaattcgtggctttacctcggtgaatactaatcagtatctggatggcattaaattacagggggacaactactctgaagttgcgatggacccttacatgctggagcgcgtagagctgctgcgcggcccgtcttccgttttatacggtaagagcaatccgggtggcgtcattgccatggtcagcaagcgtccaactaccgagccgctgcacgaaatccagttcaagatgggcaacgataacctctatcaaaccggtttcgacttcagtgacgccatcgacgacgcgggcgtttggtcctatcgtttgaccggcgtggcgcacagccaggattcacagcaggagatggcgaaagaaaaacgctattccatcgcgccgtcgttcagctggcgtccggatgataaaaccgaattcaccttcctgagcaacttccagaacgacccgtatctgggcttctatggctggttgccgcgccaggggaccgtggtcccttattacgatgctgcgggcaatgcgcacaagctgccaaccaatttcaacgacggtgaagcggtcaacaagatgtcgcgcaaccaaaaaatggtgggctacagcttcagtcatgaattcaacgatacctggaccgtgcgccagaacctgcgctacaccaagctgcaaacgcagtacatcggtttctatggtacgggctacactgcaccgggcacgcttaaccgcgcctatgtgcagtccaacgagaacctgagcaacttcgacgtggacacgcaggcgcaggctaagtttgccaccggcgctgtcgatcatacgctgctgttgggcgttgattacatgcgcatgcgcaatgacatcgatgcggactacggcaccgcgtctgacctggatatgctggccccgcagtatggcaacgacaagagcaatctttactacgcctacaacattttgaatcgccaggagcaaaccggcctgtatgcgcaggatcaggcagaatgggaccactggatcctgaccgcagggcttcgttacgacatcgctaaaacctcaacgctgacgcgtagcaccaacgataccgcggcgattaccgatcaccgattcacctggcgcggcggtctgaactacctgtttgacaatggaatttcaccttactttagctacagtgagtcgtttgaaccgaccccaggcgcgacggccgatgccaagccgttcaaaccgtccgtcggcaagcagtatgaagccggggtaaaatacatccccaatgaccgtccaatcagcctgaccgccgcggtctatcagctgacaaaagacaataacctgactgctgaccctgtaaacctaggtttcagcgtacagtctggcgtgatccgttctcgcggcgtcgagctggaggccaaggcggccgttaatgccaacgttaacgtcaccgcgtcttacaccttcaccgacgcgaaatacacccacgattcggaatatcagggtcagcgtccggttgaagtgccgcgcaacatggcgtcactgtgggccgattataccttccatgagtctgcgcttagcggtcttacggtgggttccggtgtccgttacgttggctcgacgtccagtttctacaccactggcgataacaccaataaacctttcaacgtggcgagctatgcactcgttgatgcactggtgaaatacgatctgggacgttttggcctgccgggctcctccgtcggtgtcaatgtcaacaacctgtttaaccgcgagtacgttgccagctgttatcgcgactatgcctgctactggggatctgaccgtcaaatcgtcgcgacggccaccttccgcttctaacgggttttcttcgtaaaacatagccgggtacaggccaatgccgtgcccggttaacgtaacgataggccacaaatgaaaactgccaatgtagaaccaccacaggggcttaccgacagcgtttatcgcctcgatcgcgtaagtttcaccgtaccgggacgcaccttgctgtcaccgctttctctaacctttccgcaagggaaagtctgcgggctgataggccacaacggttccggtaaatctacactgcttaagatgctgggccgacaccagcctgccacctccggcaggtgctgttgaatgaaaaaccggtcgaacggtgggaaagcaaggcctttgcccgtcaggtggcgtacctcccgcagcagcttcccgccgcagaaggcatgacggtgcacgagctggtggctatcggccgctacccgtggcacggcgctttggggcgttttcgtttgcaggacagagagaaggtcgacgaggccatcgaactggtcgggcttaagccttttgcccaacgtctggttgacagtctctctggcggggaacgtcagcgcgcctggctggcgatgatggtggcacaggatagccgctgcctgctgctcgacgaacctacctccgcactggatatcgcccatcaggttgaagtactggcattaattcaacgccttagtcaccaaaaaggcctcaccgtcatcgccgtattgcacgatatcaatatggccgcacgctattgcgatcgcctgatggcgttgcgcggcggagagatgattgccgagggcagcccgatcgagatgatgcaggggacgtgctggaaaaagtttacggcattccgatgggaacgctgcctcatcccgcaggcggagctccggtcagttttgtctactgaatccgcttcttacttgaagccgcagcggcgctttctgcgctcacttacccgaatcgcatacatgagtaagcgcatcgggtttcattcacttgcaatcttgttgcaactccaattaatgtgcggattggtcaggaatgattgattttaataacttatcccgccgtcgactgttacaggcgatggcgctggctccgctgatgttcgcttttcctgcgttgagcgcctccccgaattcgtcaaaaggtcataccgacctcgaccgtatcattgctctcgagtggctgcctgtcgaactgctgattgcactcggcgttatgccgatgggcgtcgcggatatccataactacggtttatgggtgaaagagccgcagcttgcgccgtctgtcattgagatagggcagcgcaccgcgcccaatatggaattgatgcaacagatgaatccgtcgctgttggtgatttctcagggctatggtccgaaggccagccagctcgagttaattggcccggtgctaagcgtcacggccaacgatggttcggggcatccgctgcaacaggccattcattcgctgaataaactggccgattttctcggtttgcaggaccgggccgaacgacatctggcgcagtatcagcaggtgctgacgcagactcgcgagagcctgaaatcagccgccgaacggccggtgctgttgttctcgtttcttgataaacgccatgtgcttatctttggtgaaggcagtctgttgcaggaggtgatgagcgacgtgggactgaccaacgcctggaacggtgagcgtaactactggggcagcgtgaccgttggtatcgagcgactggcgtcgattaacaacgctcgtgccctgtgctttgaccacggcagcgaaggcatactggccgaagtggcgaaaaccccgctgtggcagtcgctgccgtttgtccgtcaaaaccagctcagcgttgtgcccgccgtctggttctatggtgctacgctttgcgccatgcgtttttgccatattttatcggcaactcttgggaagcccgtatgaaccgccgttccgttagccagacgctggtcctgttaatttcgctcacctttgtctgtgctttgcttagtctttataacctgtatcaacagctgcccttcgcccagtggcgcgaggcgctgtggcagccaaatatcgataatgtgggtcagatgctgtttcattacagcctattgccgcgctctgcggtggcgctgttggccggagccggtctcgggctggcgggcctgctgtttcagcaggtgttgcgtaatccgctcgccgaaccctcgacgctcggcgtctctgccggagcgcagcttgggctgacggtcgcgacgttgtggagcttgcccggtggtgaagtgactcagcagttcgcggcgatggccggagcgattgtggttggcgggctggtgtttggcattgcctggggcaaaagaatgtctccggtcacgcttatcctcgcgggtctggtggttggcctttactgcggcgcggtgagcagtttgttggggttatttaactatcagcagctgcaaagcctgtacctgtggagcaccggttcgcttaaccagcaggactggagcacggcgggtttcctgctgccgcgcgtggtggggtctggctgctggcatttgtgctgcaacgcccaatgacgcttttggggctggacgacggcgttgcccgtaatctggggttagggctgtcggcggcgcggctggcagtgctcggattggccattttgctcagtgcccagttggtcaatgcggtgggaattatcgtctttattggcctttttgcgccgctgctggcaaaaattctcggcgcgcgtcgcctgaaatcgcggttgattctggctccgctgctgggtgccttgctgctgtggcttaccgaccaaatcgtcatgtggctgtccggcgtctggtttgaggtctcgaccggcgcagcaacggcgctggttggcgcgcctattctactgtggctgctgccgcgtctgcgcacccacgccgtgccgccaccgatgaatcagggcgaccacattcccaaagaacgtcaacatctgctgcgctggatggtgctggcggccgggctaatgctggcaggtcttgtggtggcattctgctttgggcgcaacgcacagggctggcactggtcgatgggacatccgctcgatctgctgctgccgtggcgtgggccgcgcatctttgctgcactggcagcgggggcaatgctggcgtcctccggggtgataatccagaagctgaccggtaacccgatggccagcccggaagtcttggggattagctccggtgccgcgtttggcgtggtgataatgctgtttctggtgcctggcgatgcctttgcatggttactcccggcggggagcctcggggccggattgacgctgctggttatcatgcttatctcgggatttcgtcagttctcaccggagcgcatgctgctgaccggcgtggcgttaagcaccgccttcaacactgttctggtcctgctgttggccagcggcgatccgcgcatgggtgacctgctgtcgtggatatctggctcgacctatgcggtgacggcagaacaggcgtggcgcacgggcatcattactgtgatgttgctgctgctggtgccgctgtgtcgccgctggatgagcatcttgccgctcggcggtgtgacggggcgttcgatggggtggcgttggtgcccacccgcatggcgctgctggcattggcggcggtcatgaccgcactggcgacgttatcggtagggccgctgagctttattgggctgatggctccgcacatggcgcgcatgctcggcttcaggcgggcaatggctcaatggatggtcgccagcgtgttgggtgggttgctgatggtgctggcagactggtgtggacgaatgattttcttcccgaaccagatcccggccgggctgctggcgacctttatcggcgcgccatactttatctatctgctgcgtaaacaggcgtcataaatcagcattaactcagcgcgtaatcagaaaaaaatcagggccggcagggtattaatcccttgccggccctgaatgctaagcgtaaaagtaattaaagtttagcgaagctgcgacgtgctgcatccagggtgtgctgaatgttttcctggctgtgagccagagacataaagccagcttcaaacgctgacggtgccagataaatgccttcttccagcatcaggtggaagaactttttgaaacgctcaacgtttgactgcatcacgtcctgataagaagtgacggtctccagctcggtgaagaacaggccaaacatgccgccgacgtggttaaccacaaacggaatattttcggccgccgccgccgccttcaggccttcggcaagctgagtggtcagctcggtcagtttctggtgaacgccaggctgagaaacctcggtcagacaggccagaccggctgccatggcgatagggttaccggacagcgtacctgcctgataaaccgggccggtcggtgccagcgcctgcatgacttcatgacgaccgccgaacgcgcccaccggcataccgccgccgatgattttacccaggcaggtcaggtcaggcttcacgccgtagtattcctgagcgccgcccagcgccacgcggaagccggtcatcacttcatcgatgataagcagtgcgccaaactcgtcacacagggcacgcaggccgggcaggaactcaggcagtggcggcacgcagttcatgttgcctgcgaccggttcaacgatgatacaggccacgtcgtccggatattgttcaaacaccgcacggacagaatccaaatcgttataggtacaggtcagcgtgtgcttggcgaagtcagcaggcacgcccggtgagttcggctggcctagcgtgagtgcgccagaaccggcttttaccagcaggcagtcagcgtgaccatgatagcagccttcaaacttgatgattttgtcacgatgggtgaaaccgcgtgccagacgaatagcgctcatggtggcctcagtaccggagttcaccatgcgaaccatgtccatgcttggcaccagttcagtgaccagactggccattttgacttccatctcggtcggcgcgccgaagcttaggccgcgctgcgccgcttcgataaccgcatcgcggatagtggcattgttatgacccagcaccatcggaccccatgagcccacgtagtcgatataagccttaccgtccgcgtcatataaaaatgcaccgtcagcgcgttcgatgaacagtggaacaccgcccacgccgttaaacgcgcgcaccggcgagttcacgcccccgggatcagcgtttgtgcttgggtaaatagactttctgacttactcattgagaggctcctggatttttgtgcagccagatacgggctgtacgagcaaaattagtcatgtgaaaaagccgcttcgcgggcgaccttgcgataggctctattctagagaacatggcgtcgttatgaaatgtttgcaggtgagcaattcggttaagaaagatattatgcatcttcaaatcatgatttgtatgattaaatctttaccccgaatccttttgccaatcactgaaaagagcaccatgagcgaatctttagacccgaggcccgccgcagctggccttccgacccgcagacgccctagcgaagttctgcgtcagtttttgcgtcgcgacaagacgccggtggctatccttatcgtcgcggcactggtgggtatcgtcgcgggcctgctcggcgtggccttcgaaaaggccgtcgattgggtgcagcacgtcaggctctccgggcttggcacggtcagcggacacgtctggttgctttggccattgacctttatcgtctcggcgctgctggcgatggtcggctactatttggtgcggcgtttcgcgccggaggccagcgggtcgggcattcccgagattgaggggcgctggaagaactgcgaccggttcgctggtggcgagtgattccggtgaagtttgtgggcggcatgggcacgctcggcgcaggcatggtgcttgggcgagaaggaccaacggtgcagatgggcgctaacctcggcaaaatgctggcggacattttccgcatgcgcagcgccgaagcgaggcacacgctgttggccaccggtgcagcggccgggctttccgccgccttcaacgcaccgctcgccgggatcctgtttattatcgaagagatgcgcctgcagtttcgctatagcctgatttcggttaaagcggtgtttatcggcgttatcatgtcgagcatcgtttatcggttatttaacggcgagagggcggtgattaacgtcggcgtgcttgcgaatgtctcgctgcaaaccttctggctttatctggtgctggggatggtgtttggtatcgtcggcgtcctttttaacgcgctgattttccgtacgcaggacctgtttgcccgcctgcacggagggcgtttgccgactatcctgctgattggcggtttgcttggcggcatgtgtggcctgctggggctcatcaaacctgaggcggcgggcggtggctttggcctgatcccctggccgctgcggggacttattcgctcggcgcgctgctgtttattttcattgctcgcgtcgtgacgaccctgctgtgcttctcttcgggtgcacccggcggtatttttgcgccgatgctggcgctcggcaccttgctcggtaccgcatttggcatggccgcggcggcgatgttcccagaatacggcattcaacccggtacctttgcgattgcgggcatggggctctgtttgcggcgacggtacgtgcaccgctgaccggtatcgttctggtgctcgagatgactgaaaattatcagctgatcctgcccatgattattacctgtcttggcgcaacgctgctggcgcagtttcttggcggtaaacccttgtattctgctttgttaacccgcactttacagaagcaggaacgcgagcaggctgagcaggccgcacgtacggcgtcgcagagcagtgagagcacggtttcacaaaaataaccgcaaaaattagcgggacggcgtgacgaaaacggctcatacttgaatctgagatacatgtataagataatcagttcattattcagacagtcaatccggcggcctgaacagaattcggattgggagtgaaaacatgagtgaacccattttaagtgagccaaccgtagacgaaccaccgatggcgctgccgttgcagtttactgacgctgcagcccgtaaggtcaagaatctggtggccgatgaagaaaaccctgagctgaagctgcgtgtatacatcaccggcggcggttgcagcggtttccaatatggcttcacctttgacgacaaagtcaatgacggtgatatgaccatcgagaaatccggcgttgcgctggtcgttgacccaatgagccttcaatatctggtcggcggcgaagtggattataccgaagggctggaaggttcgcgcttcgtggtgactaacccgaacgctaaaaccacctgcggttgtggttcatccttcagcatctgatgctgctgcggtgagaaagaattgaaaagccctgtgcatttgcacggggctttttttatggctcaacgcttgagtgcgtcaatctccgaacacagctgctgcgcggcaagcaggatgcggggacccgcgcggttgaaccagtcggcgttaaccgcgagaagcggcacctgcagctgaccttgccaaaaatgattgatttcggcctgctgctgcgtggtaccggggaaaattatcgcctttggcgcgcgactcagtacctgctcgcggctgacctgcggccagggcgcggggctatcggcaaagatattttctgcgccgcacaggctgacaatctgactctgtagggtatgacctgaactggtaaaaagtggctgagtagagaactggataaacaccggcaccgcagcgtgctcaggatgttgcgccttcaattgctgtagccgttgccgcatctgacgggccgctgcatggccgttttcaggctcgcggctatagtctgcaagcttgtccagcgcgtcggcgacttgctccacgctttgcggatccagatagacgactttgacgcccagcgaagccagttgatccagcggccgctgcggactcccgcctcgccacgccagcaccagatcgggttttagccttagaatgcgttcgacgttaatcccttgccagttggcaacttgctctatcttctgtgctgcaggggggaaatcggaataggcgctgacgcccaccagcttatcgccgagtccggcggcataggccagctcggtcaagttgggcgcgaggctgaccacgcgctcggcaacctgcgccgtcgccgccaacggcagccacagcgcgataagcaggagaagcctaagcacgaggctggattactccgcagccagcgctttcagcatggcgtcaaccatcagggttgactgctcggcggcgaccaccaggaactcttcaaagctcaggtgtgattcgctgtcggcgacgtcggagatggcgcgcacgactacgaacggtgtaccgaacaggtggcacacgtggcctacggcagcggcttccatttctacggctgccacgtttgggaaggtattgcgaatgcgcgccagcggttctgcgccgttgatgaaggcatcgccactgcaaaccagcccgcgcacagcgttcagtttcagaccggtgaggcattcttcggccagtttgatcagtttggcatcagccacaaaagacggagggcaacctgccatctggcccggctcgtaaccaaaagcggtgacgtcggcgtcgtgatagcgaacctcttcggaaaccacaatgtcgcccactttcagcgtcttggcgaggccaccggcggaacccgtattgatgaccacgtcgggcttgcagtgctccagcagcagggtggtccccatagctgccgagaccttgccaatgccagatttcagcagcgccacgtctacgccgttcagctgtccggtatagatttcgcagccagcgcgttgcagggtttgacggttttcgattttgtcgcgcagaagggtaacttcttgttccattgcgccaatgatgcctactttcatagtgaatactcgcagatgataaaaatttccccatcatcattcagatgcagggcatgttggacacggcctcgatgaatgcggcatagtctatcatggctaaaggcaagaaataatgcgtttactgcctgcaacaaggctcaggattaacggaagaagtgactgataaggtaggaaatcatgtctgggatcgattttaaaacgaaattcaacttccaacgtccttttagtccaccgatagaagccggtgatgaatacgacgtgatccgccagtttgaaagcgatcgcggacggatcatcaactccgccgccattcggcgtctgcagcagaagactcaggttttcccgctcgagaaaaacgccgcggtgcgcagtcgcctgacgcactcgatggaggtgcagcaggtggggcgacacatcgccaaagaggtgctgcatcgtctgcgtaaagcggggcgtatcgagagccttggccttaccgagtccaccgatccctttgaaagcgtggtcgaaatggcctgtctgatgcacgatatcggcaatccgccgttcggtcattttggcgaatccgctatcaataactggttcgcgaaacgcatggataccgccagcatcgagagcggggggcggcgttcgaaagctgccgccccggttttctgtgcctcgatgggcaagacgccgagctggacaccttgcgtaaaaaggtgcgcgtcgatctctgccattttgacggcaacgcgcaggctatccgcctggtgtttgccctgctaaaactcaatcttacctacagccagagcgcctgcatcctcaagtacacccggcccgcctattggtcgggtaaacctctcgacgaattcagctacctgatgaagaaacctggattctatctttccgaagagccgttcattcgccgtctgcgcgatgagctggatctcggtgaatttcatcgttacccactgacctacatcatggaagcggccgacgatatttcctactgtatcgctgaccttgaggacgccgtcgagaaggatatcttcaccgtcgagcagctttatcagcaccttaagcgcgagtggaaagaccaacagccgggcgatctgttcgaaagcgtggtcgataccgcctatcagaaaatggatcgcgccaaaacgttccgcaatccggtggattacttctttatggagctgcgggtgcagacggtgaagcagctggtcccgcatgctgcgaagcgatttataagtaatttatcgtcaatatattcaggaaccttcaatcaggctttacttgaagatgacagccagtctaaccggctgctggaaatatataaaagcgtggcgcgtaagcatgttttcaaccactatgaagtggaggaacttgagttgcagggttatcgagtcattagcgggctattggatatttacagtccgctgctggatatgccgttggccgagtttacccaactggtggaagaggacacgcatcgcgactatcttattgaaactaggctgtttcataagctttcttccaagcatcgtctggcctacagcgaagccatcgcgaaattagccgacgcctccgaggcgcagcgacaggtgagcgaatattatttccgcgcgcgaatgatccaagattatatcagcggcatgacggacctctacgcctacgatgaatatcgccgactgatggcagccgaataattcgcggggatattagccgatttaagtgaaattatttcgagcaatcccttggttaaaaagtaggcttttgtaaatatcgacaatatttttttactattgtcagatcgacgaagatgaacttcgggttattaataaaatctcagtaacgactacctggcaaagtggcaaagacttgtcgccaccatataaattaaagagatttcttctgatgaaaaaaactactctattcttgagcgctctggcgttaagtgttggtatggctgtagcgcctgtttcatcggcattggctgcagagacggcttcttccagcaccactcaggttcctagcctggcaccgatgttggaaaaagtgatgccttcggttgtcagcatcaacatcgacggtagtgcaccggtaaaaactcctcgcatgggacaacagttccagcagttctttggtgagaattcaccgctttgccaggatggttcacccttccagggttcacctgtctgccagcagggcggtgcaggtggcgatgacggcagcgacgacggccagcagcaagcccctgaaaaacaggccttccaggcgctgggttctggcgtaatcattgacgcggctaaaggctatgtggtgaccaataaccacgtagtggataacgccaacaaaatcaccgttgtgcttaacgatggccgtcgctacaacgcgaaggtgatcggtaaggatccgcagtctgacatcgcggttatccagctgatcgacgctaaaaatctgacggcgattaaatttgccgactccgagcagctgcgcgtgggtgactacaccgtagccatcggtaacccttacggtctgggcgaaaccgcgacctcggggattgtttccgcgctgggccgcagtggcctgaacatcgagaactacgagaacttcattcagactgacgccgcaattaaccgcggtaactccggtggcgcgctggtgaacctgaacggtgaactgatcgggatgaacaccgctattctggcaccggacggtggcaacatcggtatcggttttgctattccaagcaacatggtgcaaaacctggcgaaacagatgattcagtacggtcaggttaaacgcgccgagctgggcatcatgggtaccgagctgaatcctgaactggcgaaagccatgaaagttgacgccgatcgcggggcctttatcagtcaggttctgccgaagtctgctgccgagaaagccggcatcaaggcgggcgacgtgattgtcagcatgaacggcaagcctattagaagctttgcttcgttccgtgctgatgtcggcaccatggcggttgggagcaaaattaccatcggcctgctgcgcgacggcaaaccgcttaacgttgacgtcactctgcaacagagctctcagcctgcacaggttgcttcagccacggtttacaccggtattgaaggtgctgaactgagcaacagcgacgttaacggccagaaaggcgttaaagtggataacgtgaaaccgggttccaccgcggcacgtgtcgggttgaaaaaaggcgatattatccacggcgttaaccagcaacaggtcaataatctgggcgatttgcgcaaaattctggacagtaaaccgggtgtactggcgctggatattcagcgcggcgacagccagatttatctgctggcacaataagcgttggcgcatcgcgcgccagcttgacctcgcgtcgacagtgaagaaaaagcaggcagacttcggtctgccttttctttatccccgcaaactgtgatgtcactcccaactctgaacggatccccggcgctttgtgcgtttgcacaatgtatgacgccgctcgactgcgtattctgattaaaataattaaaacgaacaggagcagcaggaagatggcggcctatcactttgattccaagctggcgcagcagatagtcgcccgcacgatgcagattatcgacagcaacgtcaacgttatggacgccagagggaaaatcatcggcagcggcgacgagcagcgtctggggaattgcatgagggggcgctgctgtgcatttcacaggaacgtgtggtggatattgatgaaggtgtcgcccggcatctgcacggcgtcagaccggggatcaatctgccaatgcgcatcgacgggcagatagtgggcgtcatcgggctgacaggcaaccctacgcagctgaggcagtacggagaactggtgtgtatgaccgccgagatgatgctggagcaggcgcgcttgctgcacatgttggcgcaagacagccgactgcgtgaggagctggtgctcaacctcattcgcatggatgagctctctccggcgctgatggagtgggcgcaacggctggggattgatattcacaagccgcgcgtggtggcggtcgttgaggtcgacagcggccagctcggcgtagacagcgcgatggccgaacttcagcagctccagcagctgttaaccacgcccgaacgcgacaacctgattgccatcgtctcgctgacagaaatggtggtactcaagcctgctcttaacagctatgaccgatgggaccccgagtcgcatcgccagcgggtggagcatttgatgtcgcgaatgaccgagaacggtcggctgcggatccgaatctcactgggcaactttttcaccgggccgggcagcatcgcgcgctcttatcgcaccgcgaaaaccaccatggccgtcggcaagcagcgtatgcccgataagcgcagctacttctatcaggatctcattcttccggttctgctcgacagtctgcgcggcggctggcaggccgatgagctggtacgtccgttggcgcgcctgaaagcgaccgataccaacggactgcttcgccgtaccctggcggcgtggttcacccacaacgtgcagcctacggccacctcgaaggcgttatacattcaccgtaacaccctggagtatcggcttaatcgcatctcggaactgacggggctggatctgggcaacttcgacgatcgtcttctgctgtatgtcgccctgcaactcgacgaagagcactgatcgaaaactcataaacagcgtctcatcaacaaggtatttattataaggatcctcgcagcgacgaggagtattaataaataatggcagtctgagccttggctgcgggaatttaataatgtgatattaatcacaattgaatttcttcgccgtatagccttattttcctataacccaccgacttttcgacccactattttttcgtgacataactcgcagccgattgtgcagttgcagcaatttaattcacctgaccgctttaagcttggcgatttgcctagtgaggcgcgtaaaccttgcccctatactgattatctcagtcattgttcgataatgaactttctaataagaatgacgttttcattaattacatgacgccttgttcagtatgagttttattctgacaccctgcattttttcttcatcagaataagctttgcatcctccctctctttggagaacaccatggtgactttcagctcggcggagagtatgaccaaaaacagaactaacgctcgctactggatagtggtgatgttgtttattgtgacatcattcaattatggcgatcgagcaacgctttctattgccggttcggcgatggcgaaagatattgggctcgattcggtaggaatgggttatatcttttctgcattttcctgggcctatgtaattggacagattcccggcggctggctgctggataagtttggatctaaaaaggtttatttctacagcatctttatctggtcgttatttaccctgttgcaagggtttgtcgatatcttccacggttttggcatcgtcgtcgcactgtttgcactgcgttttctggtcggtctggccgagtctccgtctttcccgggcaatagccgcattgttgctgcctggttcccggcacaggagcgcggcaccgccgtgtctattttcaactccgcccaatacttcgcgacggttattttcgccccgatcatggggtggctcacctctgaagtcggctggtcgcacgtgtttttcttcatgggcggcctggggatcgtgctgagctttatctggctgaaggtcatttacgatcctaaagatcatcccagggctaatcaggccgagctggattatatcgaggccggtgggggactgatcaatatggatcataaggaaaacaagggcggaaaggtcatcggtaaaggcagtaaaacccaacagatcaagcagctgctttcctcacgcatgatgatcggcatttacctcgggcagtactgcattaatgcgctgacctactttttcattacctggtttcctatttatctggtgcaggaaaaagggatgtcgatcctcaaggccgggatggtggcctcgattccggcgattatgggattcctcggcggtattctcggcggcattatttcggattacctgatgcgccgcacccaatcactcacctttgcccgcaagttccccatcgtgctcggtatgctgctctctatgtcgatgatcgtttgcaactatgtctcaacagaatgggtggtggttgccgtcatggccgcggcattcttcgggaaaggcattggggctttgggctgggcggtgctagccgataccgcaccgaaagaaatcagcggcctcagcggcggtttattcaacatgtgcggcaacatctccggcatcgtgacgccgattgccatcggttacatcatcgcggcgaccggctcgttcaatggcgcattggtttatgtagcgctccacgcgctggtggcggtggtcagcttcctgttcatcgtgcaaaaaatcgaacgtatcgaactcaaggcttactgagattgacggatttcatttttaacgtgccgacttaacgcggaaggaaatcatgatgagtacacaaagttcacccattattaccgacatgcaggtcattccggtcgccggtcatgacagcatgctgttgaatattggaggtgcgcacggtgcctttttcacccgtaatatcgttatcctgaaagacagtgcgggcaacaccggagtgggggaagccccggtggcgaagtcatttataacaccctgatggatgcggtggcacaggttaagggcaaggagctggcgcgcatgaacagcctggttcatgcgatccacgtcggcaatcagtcctcggattttgactccttcggcaaaggggcctggacctttgagcttcgcgtgaatgccgtggcggcactcgaggcggcattgcttgatctgatgggccagttcctcggcgtgccggtggttgaactgctcgggcctggcaaacagcgcgatgaagtgaccgtactgggctatctgttttacgtcggcgatcgcgagaaaaccgacctgccttatcagggcggtgaaggaccgaaggacgcctggtatcacctgcgtcatcaaaaggcgatggacagtgcggcgattgtccgtctcggcgaggcggcgcaggcgcgctacggtttcaaagacttcaaactcaagggcggcgtactgcggggtgaacaggagatagaggcggttaccgaactgcataaacgtttcccggatgcgcggattaccgtcgatccgaacggcgcctggctgctcgaagaggccattagtctgtgtaaaaacatgcgggggattctgacttacgcagaggatccgtgcggtgcggagcaaggtttctccgggcgtgaggtgatggcagagtttcgtcgtgcaaccggactgccggtggcgaccaatatgatagccaccaactggcgcgagatgcagcacgcggtgatgctgcaatccgtcgatattccattagccgatccccatttctggaccatgcagggtgcggttcgcgtggcacaactttgcaacgactggggcctgacctggggctgccattctaataatcatttcgatatctcgctggcaatgttcacccacgtcggggccgctgcacccggtaaaccgacggcaatcgacacccactggatttggcaggaaggtaaccagcgactgaccaaagagccgttacaaatcgttaacggcaaaatcaaagtgcccgaaaaaccgggactcggcgtcgaaatagacatggatagaatccatcaggcccatgatttacataaaaaactgccgagcggtgcacgtaacgatgcggcctcaatgcagtacctcgttcccgactggaaattcgaccgtaaacgcccggcgtttggtcgttaaataggagccgttatgtcttcacctaaaatcgtttcgatgcaggtcgtacccgttgccggacacgacagtatgttgctcaacctaagcggcgcccattcgccgttcttcacgcgtaatattttgattctaaaagataacgacggtcacactggcgttggcgaagtgcccggtggggagaagattcgccagacgctggcggatgcagaaccgctggtggtcggcaaaacgctggggaatacaagaatgtgatgaacgcggtgcgccgtgagtttgctgaccgtgatgcttccggacgtggcctgcaaaccttcgacctgcgtactacgattcacgtggtgacggcgattgaagccgcgatgcttgacctgctcggccagcaccttggcgttaccgtcgcctcgctgctgggagacggacagcagcgcgattccgtcgaaatgctgggctatctgttctacgtcggcaatccggataaaacgtcgttgccgtatcagcgcgaaaaagatcagcgcaacgactggtatcgtctgcgtcacgaggaggcgttaacgcctgagagcgtggtacgtctggccgaggcggcctatgagcaatacggttttaacgatttcaaactcaagggaggcgtccttagaggcagcgaagaggccgaggcggtgactgcgctggcacagcgctttccgcaggcgcgcattacgctggatcccaacggggcctggtctcttgatgaggcgatcggcctgggcaaacagctgcgtaatgtgctggcttacgccgaggatccttgtggtgcagaacagggcttttcgggccgtgagatcatggccgaattccgtcaggcaaccggactgcctaccgcgaccaatatgatagccaccgactggcggcagatggggcataccattcagctcaaatcggtcgatatcccgctggcggatcctcatttctggaccctgcagggatcggttcgcgtagcgcagatgtgccacgagtgggggctgacgtggggatcgcactccaataatcactttgatatttcgctggcgatgtttacgcacgtggccgccgcggcaccgggcaaaataaccgctattgatacgcattggatctggcaggaaggcaatcagagcctgaccaaagagccgttgcagattaagggcggcagggtgaaagtgccggaacgcgcggggctgggcgttgagattgatgccgatcgactgatgaaggcgcacgagctttataaaaacatgggcttgggcgcgcgggatgacgcggtgggcatgcaattcttggtgccaaactggacgtttgatcctaaaaagccctgcctggtgcgttaagggcgccgcgctagactctgcgcgcgcatcctggaaggtcaaggtctaaagcacgcggcttctgggcggtctaggccgcccagtaagcgaagcgcatgttttttaacttgaagcgtttaaagcgcttaaaaagatgactcgatttataaaaatcgtcgtcactacgtgacaggcgctgggttaaacaccgcgagggcattatggagcccccattgatctgaccaggttttcttacgcccgctggcgatatccagaataaagtgaaacagctcccagccgacgtcctcaatggatgcatcaccggtggcgatagtgccggcgttgatgtcaatcagatcaaaccagcggttggcgagcgtggtgcgagtcgccatttttattaccggcaccgccgtcagtccgtaaggcgtgccgcgtccggtagtgaaaacctgcacggtaatacccgaggcaacctgctgcgttccgcacacaaaatcactggctggggtggcggcatagattagcccacgtcgggtgggccgctgtcccggtgatagcacctcgacaatagcgctggtccccgacttggcaatcgagccgagggctttttcgaccacgttggcaaggccccctttcttgttgcccggagacgggttggcgctgcggtcggtcataccggtagcaagataattgtcgtaccacgccatctcctcaagcaaccgtctgccgacctgttcgtcgaccacgcgcggcgtgagcaggtgaatcgcatcgcgcacctcggtgacttcagagaacatcaccgttgcgccacagcgtaccagcaggtctgaggcgaaaccgacggcaggattggcggtcacgcccgagaaggcgtcgctgccgccgcattgggtgcccaccactaaatcggacgccggacagctttcccgctgacgtttgttgaggcgctgtaggtgaaagtcggccacggtaagaatatcgtcgaccatcgactgaaatcccacgtgctgttcgtcctgtaggcggaccaccttcgcgtcatcgagagaaatggcctgcacgtcggacgttcccagcagcagtttttccggctgcagcttctcacagcccagaccaaccaccatgacttcgccgccgaaattcggattcagggccaaattgtgaatagtacggatgggcaccacggcagcgggcgcattgatagccacgccgcagccgtaaaggtgattgaggccgacgacaccgtcgacgttggggtatttgggcagcagacagcgttcgataatcttgaccacgtaatccaccacgccagccacacagtgcacgctggtagtgatgccgagcagatttttagtgcctacgctgccgtcggcgtttctgtagccttcaaaggtgtatccctcgagcggcggcagcggtgcagggactcgggtggcaagcggcagactctcgagcgtgggggcctgcggcagcgcgaccactgattcgtcaatccagccaccttcgggatgtcgcgcagggcgtagccaatcacctcgccgtagcgaacaatatcttcgccctgcagaattttgtttagcgccactttgtggccctgcggaatatgttccaccagcacaagaccggaagcgaacgcggtaccggccggcaggccgttgtcgttaacaatgatggcaacgttgtcgtcctgatggactttgatatacaaggcctcggtggcctgctcttttttacgcgacataaacggctccggtaagcaatgcggcgactatccacccatgaccagaaattatacgcaaagccactgcattgctcattgtgcaactgaacagctttgcgcagcttaaaagcgcttttatctggcaaatgtgtgagcgaacgtgacgttaatcaccgtttttagagggcgttgctatcccgctgaaagagtgtgattcctgtcccatgcccatgtggttatgctaaaaaattgccggtaactcgcggggatccttgggcgcttgcacagtgttattttggcctgcgctttttatactgaattaacttttgaatggctgcatcagcgacgcaggccgtgtccgcatttgtcgacccccataattgaggttccgtatgagtaatcaaatgattccaaaccgtttccgtcaggacctgttggcgggaaaaaccttgataggttgctggtctgccttgtccaatcccatctcgaccgaggtgctgggactggccggattcgactggttgctgctcgacggcgaacatgcgccgaacgatatttccagcttcgtggtgcagctcatggcactgaaggacagccgcagtgcgccggttgtcaggccgccgaccaatgagccggtgattatcaagcgtctgctggatatcggcttcgccaacctgcttatcccgttcgtcgaaacccaggctcaggccgagctggcggtggcctcaacgcgctatccaccggcggggattcgcggcgtatccgtctcccatcgcggcaacatgtttgggaccgtgccggactatctggcgcaggcgaacgaccacatcagcgtcatcgtgcagattgagagccaacggggcgtcgacaatatagacgccattaccgccgtcgaaggtgttgactgtatttttgtcggcccgagcgacctggcggcggggctggggcatttaggcaatgccggtcatcctgacgtgcagtctgccatcaaatacattcttgaacgagccaaagcgcacggcaaacccagcggtattcttgccccggttgaggccgatgcccgtcgttatatcgagtggggagcaaccttcgttgccgttggcagcgacttgggcgttttccgcactgcgacgcaggcgctatgcgaccgtttcactaaataatttgaggggaaaagcatgaaaatcggattcattggtctggggattatgggcaagccgatgagcaaaaacctgctcaaggcgggttattcggtcgttttccttgaccggcataaagagacgaccgacgagctgctggccgccggtgccgaaaaggcggcaaccccgaaggcggtggccgaaaaaagcgacatcatcataaccatgttgcccaattctccgcaggtgaaagaggtggtgctgggggaaaacggcattatcgaaggtgcgcgtgagggcgctattgtcatcgacatgagctccattgcgccacttgccagccgggaaatcagtctggcgttggctgagaaaaaaatccacatgctggacgcgccggtcagcggtggtgaaccgaaggccatcgagggaacgctgtcggtcatggtcggcggtgacaaggcggtgttcgacacatgctacgaggtcatgaaatcgatggccggttcggtggtgcacaccggagagattggggcgggtaacgtgaccaagctggcgaatcaggtcatcgtggcactcaacattgccgccatgtctgaggcgttggtgctagcgaccaaagcgggcgtggatccttcactggtttatcaggccattcgcggcgggctcgccggaagcacagttttagacgcaaaagcgccgatggttatggaccgcaatttcaagccgggttttcgtattgatttgcatatcaaggatctggcgaatgcgttggatacctctcacgagattggggcacaactgccgttgactgcgtcagtgatggaaatcatgcaggcgctaagggcggacggtcaaggacaatctgatcacagcgcaatagcacgctattatgaaaatttggcgaaggtggaagtcacccgataatcaaccaacgggcgcggctcggaatacagccgtgcggatggtttctgaaaagtggctcgtttctgaaaatggatagcttatgaaaatagtaatcgcaccggattcatttaaagaaagcttgtcggcactcgacgtggctacagccatcgaaagtggctttcgtgaaattttcccgcaggccgaatatgtcaaactgccggttgccgacggcggcgaaggcacggttgaggctatggttgccgcgaccggcggacgggttatcgaggccaacgtaaccggcccgctcggcgaaccgctcaaagccttcttcgggctttccggcgatgacaagatagcctttatcgagatggcggcggcgagcggcctcgagagtgtgccgcaggacaagcgtaaccctttgaaaaccacctcttacggcaccggcgagctgattaaaaatgcgctcgaccacggcgttgaacactgcattattggcattggtggcagtgcgaccaatgacggtggcgcaggcatggtgcaggcactgggggccaggctgctgaccgcagacggcaaagagataggctatggcggcggtgagctgaagcatctggctaatattgacatcggcgggctcgataagcggattaaaaaatgccgctttgaggtggcctgcgacgtcacaaatccgttaaccggtgacgagggggcgacggcaattttcggcccgcagaaaggggctacaccggagatgatcgctcagctcgatggttatttgaaacactatgcccaaatcatcaagaaagatttaggcatcgacgtcgaacatgttcccggtgccggtgccgccgggggaatgggggcggcgctgtacggattctgtcacgctgagctacgtcaaggcattgaaatcgtgaccgaagcactggggttggacgcgctggtcagagacgctacgctggttatcaccggcgaagggcgcatcgacagtcaaagcatcaacggcaaggtgccgattggcgtcgcgcgcgttgccaaacgttataacaagcccgtgatcgccatcggcggcagccttacccaagatgtcgacgtggtttatgaacatgggctggatgcggtcttcagcgtgctctatagcatttgcaccctcgaagaggcgctggacaacgctgccgataacctgcgcaagtccgcgcgcaatattgctgccaccattcgtctggcacaaaaattttaattccctgtccaggcagacatttttaaccccaaaccggtgtcttcaaagggagatatcggttttttattgcatccaggcagcgcctgcttaaagcggtttcatccgcgggttttttacgttaatttttaggcctgtcatttaacgagagcgcaccatgtcagagactttttttgcccgcctaccggctaacacacacaccaaagggctgggtcttctgcccgccaatgcccagatgggcgacatcgccaggcagggctggaacatcctgcaggagcaggttagcctgccggttgccgtgctgtcggaagaaaaaatccagcataatctggcatggatgcaagagttcatcgaccgctatcaggtcaagctggcacctcacggtaaaaccaccatgagtcccgagctgttccagctgcaaactgacgctggtgcatgggggatcacgctggcaaccgcgccgcagaccgaggcggcgtttgcccacggcgtgcgtcgtgtgctgatggcaaaccagctggtggggaaaggcaatatggcgatcgtcgccgagctgatgcgccgtgacgcccattttgagttcgcctgtattgtcgattcggcggacaacgtggacgcactgggcgagtattttgccgaaagcggccagacgctgcgcattctgctggaatatggcgtggtggcgggccgaacgggtatccgcgatcggcagcaggaagacgcggtgcttgaggccgtggcgcgctggcctcagtcgctttcgctggtggggatcgagatttatgaaggtgtattaaacgaagaagcgccaatccgcgagttcctgcgccacgtggtttccagagccgaggcgctggccgaaacgggatgcttcaaagagccggacgttattctttctggcgcaggatcggcctggtatgacgtggtggcagaagagtttagccgtgtgaacaagcatctcgacagcgccagacgccatacgctggacgtggtgctgcgcccgggatgctacctgacacatgatgtcggtgcctatcatcgtgcctccgatcgcatcaagcagaataaccctgtggctcgcgaaatgaactttagtttgctcccggcattgcaggtgtgggcctacgtgcagtcactgccagagccgggcagtgcgattatcggactgggcaagcgcgactcttcgtcggatgccggattcccggtcgctagcggccattatcgtcctcagagccgcagcagtgaggcctatgccgccgttgtacctgcgccaaaagactggaaaattttcgccatgatggaccagcacgcttttatgtcgatacctgaagacgctgacatcaaggtgggtgacatgctgtcgtttgatatttcacacccctgtctgactttcgacaaatggcgtcagcttttgctcatcaacgaacagtttgatgtgacgggctctgtttccacctggttctaaatacacgatatctttcgcacggcagatgcgttagcttcctccgctcaccccggtcactgacttgtgtcagctcccggggattcgcctcgttgctgccttcctgccgcacgaaatctatcgcgtattagatattatttggcgatgcagatgcgttagcttcctccgctcaccccggtcactggcttgtgtcagctcccggggattcgccttgttgtcgccttctcgcacagcgaaatctatcgcgtattaggtattatttggcgatgcagatgcgttagcttcctccgctcaccccggtcattggcttgtgtcagctcccgggattcgcctcgttgctgccttcctgccgcacgaaatctatcgcgtattattgccgcgcagatgcgctttagcttcacgggttacgttgtcaatttcatccagcagttctaaccattcgggttcgagttcggcggtagaagcgttttttcttagctgttgttcgatgtagaaacacagctgttttaaacgcggcacgccgctgtagctacagctgccgtgcagcttgtggatcagcgccagaatatcggcatctttttcgccctgggtaatggcggtcacgcggttgctgacctgcggcagaaaatcgagcaacatttgcagcaggtcgttagccaaggcctctttattggccgactgacgcagcgccagcggccaatccagagtcttgagagactccaccggcatcggcttgtcgagtggggtaaagctatgctgcgcaatcggtgtctgcgaagagtgatggcgcgccaacacgactttcagcatcgcttcatcgatgggcttcgacaggtaatcttccattcctgctttgataaactgctctctttcgccactcagtgagtgcgcagtcacggcaacaataggcgttttgctgtggtgcggaagctggtgaatcaattcgctagtgcggatgccgtcgatcttgggcatctgaatgtccatcagaatcacgtccatgctgacgttcttcgccagctcaatggcctcttcaccgctgttgcacagcaaggtggtttcgaccagttcctcgagcagcgccccgataagcttgagattggcagggttgtcgtcgacggccatcaccgtcatcggcaggcgttggccgcgatgacctgcgccttcgccgtcctggctgctgtcttcgagcagatacggcatcagtcgcacgctcgacaccggcttactcacgcaggcatatacgcctttacttttgagctgttcggccgaaatctggaactggcttggcagtgccagtatcaggcgatcgcagtggcttaacagctgttgcaaccgctcttcgtaatcttgcaggtggtggttgaggcgaattggcatgccataaagaatgaaatcatagtgctcgtcaggcaacagcgcctgactggtgcggtgaatgacctcgaccggcgtgctcgacagcatctccttcactgccttggctgctgtcggattcgcctcgatgtaggccagtcttttgcccctcaggcagctcatcgacggcggcgcgtggtgatggctttcattaagctcaagcgtgatgtggaaccagaaggttgagccacggttaaactggctgtagaagctgatatcgccgcccatctcctttaccagtcgctgggtgataaccagccccagtcctgtgccaccgtggcggcgggtaatgctggcgtcagcctgtcggaaggcctggaacagctgcgactgctgtcgttctgaaatgccgatgccggtgtcgtgaatctgcatctccaattcgacttgcagattgttttgcgagcgcaattccacattgatatcaatgttgccattttcggtgaatttgatggcatttcccagcagatttgtgacaacctgctgcagtcgcatcgggtcacccagcacgttttccggcacattattgtgcacattaatggtgagttccaggcctttgtcgtgagcgctgtgcgccagcagaatcaccacttcgtcgagcatttctcgcagcgagaacggaatgtgttccagtaccagctttccggcctccagctttgagaaatcgagtacgtcattaatgatggtcaaaaggttgttggccgaacgttcaatagtctgcaaatagtccgtctgggtgggcgaaagctgtgtttttagggtctggcgggtaaagccaatgaccccgttaagcggagtgcgcagctcgtgcgacatattagccagaaactctgactttattcgcgcggcttcctgagcgcgcttcttcgccagatcgagctccacgttctggatctccatctgctccagcgtttcgcgcaggtctgacgtcgcctgatcgatgttttgctgcacctcctcatgataggcggtcagggacatcgccatcgaattgatgccatttttcagcatgcttagctcgccgagcatgttgccctcaacgcgactgtcgagctggccgcgacgaattcggtcgacggtgttgaccatattacggataggcccggtgacgtcacgcattagacgataggcaaacagggtggcgatgccgaggcacagcagcaggaagagggttgagacaaaggcctcctgatactgctgaagtcgtaccgagctgaggtcaagctcaatggcgatgtaaccgagattgcgctcggggacccgcgaaagtcgccatcgggggcatcggtgtggttctccgccaggatcggggtgcgcagtatcagggagtcgcccgagcgttcctgggtaagctcctgcggcagcgggtcgccgcttgctacctgcaaaaggtcggtgtcgcgcaaggaattcgaggtggcaaacagggcgttgttgccgtcaaacacgctgattgcccgcacgatatcggagtgggtgcggtgcagccggtcgataagtcgggttatgggagcgcgctcgcgaaacgtcatcccgtactcactggcgaccgccaggggttctataatactggcacccgagtcgatgagctggttctgcaattcgttgtagcgatgcacgataaagaaggtgctgagcagcaaaccgatcattaacgtcggtgccagaattaaaatcatcatccttgcccgaaggctatatttggtcatgaggttccgatgtgggagaattggcggctgacgtatacctaaagtaatagaaattgccgtaaatcgacaacttcaggcacgacgggtatcaatttcatgaatcagcatgcgaacaacaatggcccaattctactctccgaaccgccgcgtgacgacccggcaaatgattactgtgaccgcaaccgaccttgacgcgttcgggcaaggtgtggcgcgtcacaagggtaaaacgatatttgtcactggcctgctgcccggagaacaggcagaagtgacgctgaccgaagacaaacgccagtatgccaaggggcgagtaaagcgcttgctgagcaccagcgaggatcgcgtcgcgccagaatgccctcacttttcggtctgcggcggttgccagcagcagcatgctagcgtcgcgctgcaacagcgcagcaagtcggaatctcttctgcgcctgattgcgcgcgagactggcgttaatgccgagccggctccggtcattgccgctgaaccttacggatatcgccgtcgtgccaaacttggcttgcagattgctttagccaaaccgggtgcgaagaaaatgccggtaatgggcaagcctcaaaagggtgcagcggtggcctcaggtccgctaatgatgggattccggcaagaaggctccaactcgctgataaacatcacgcgttgcccggtgctccgcccagaactggagcaactgctggttccgttgcaccaatgtttagcggcgctaaaggcggtcagccgcctcggacacgttgaactggtattggcagacaacggcccggtcgtcgtgctgcgtcatctcgacccgctggttgagagcgacagggagaacctgttggcgtttgccgagcgccacggcatcacgtttttcctcgcgcctgacagcgagaacattgaaaaattgtgtggtgaatcgccgttttatcatattgacggcttagccttgcagtttaatccgcgagattttattcaggttaatgacgcagttaaccaaaaaatggtcgcgcaggcgttatcatggctggatatacagccagaagatcgcgtattggacctgttttgcgggatgggcaatttcactttgccgctggcaaagcgggcaaagcaggttgtcggggtagaaggtgttgccacgctggtggcgaatgggcaagataacgctaagcgtaatcatttatcccatgtctctttttaccacgagaaccttgaggacgacgtgagccggcaaccttgggccgcgcagggcttcaataaggtgttattggaccccgcacgcgccggtgccccggagtcatggcgcatattattaaacttgctccgcaacgagtggtctatgtttcttgtaatccgaccactctggcgcgtgacagcaaaactttgctggaggcgggctatcgtctgaaagaggtgcgtatgctggacatgttcccgcacaccgggcacctcgaatcgatggctttgtttatcaaccagtctggtgaataaaaatttataccccgttgcaggagcagtggctcgggtgcgacggtgataccagaaacgtagggagaggttatggttgcggtacgtagtgcacatttgaatacggctggcgaatttgcgcttgacgagtggatcacgactttaggcatctccagccaggaatcatgtgagcgtttagccgaaacctggcgctactgcgaacaacaaactcaagggcatcccgacgcctcgctgctgctatggcgcggcctggaaatggtagaaatcctttccacgctgagcatggacaacgacagtatgcgcgcggcgctgctgttcccgctggttgatgacggcattattgacgaggcgaccctcgccaaggcgttcggtaaagacatcacttatctggtgcacggcgtacgcgacatggacgctattcgccagctgaaggccacgcataatgactcgatggcctcggagcaggtcgataacgtccgccgcatgctgctggccatggtcgaagatttccgctgcgtggtgctcaagctcgccgaacgtatcgctcacctgcgtgaggtaaaagatgcgccggaagaagagcgagtgctggcggcgaaagagtgtaccaacatctatgcgccgctcgctaaccgtctcggtatcggccaactaaaatgggagcttgaggacttctgcttccgctacctgcaccctgatgaatacaaacgtatcgccaaactgctgcacgagcgtcgtattgaccgcgcgcagtatatcgatgactttgtcagcactgtgcgtaacgccatggcggaagagggcattaaggttgatgtctacggccgaccaaaacacatctacagcatctggcgcaagatgcagaaaaaatccctctccttcgacgagttgttcgacgtacgcgccgtgcgcgtagtggttgaacgccttcaggactgctatgccgcactggggattgtgcacactcatttccgccatctgcctgacgagtttgacgactacgtcgctaatccgaagccgaacggttatcagtcgatccacacggtggtgctgggcccgcgtggtaaaacgctcgaagtacagattcgtacccgccagatgcacgaagacgccgaattaggcgtggccgcgcactggaaatacaaagagggtacggcggttgcaggcggccgcagcggcggttacgaaggccgtatcgcatggcttcgtaagcttattgcctggcaggaagagatggccgactcgggcgaaatgctcgacgaagtgcgcagccaggtgttcgatgaccgagtttatgtgtttacgccgaaaggtgacgtggtcgacctgccaatgggctccacgccgctcgatttcgcctaccacattcacagcgacgtcggtcaccgctgtatcggggcgaaaattggtggccgcatcgtgccgtttacctatcagttgcagatgggcgatcaggtcgaagttatcacccagaagcacccgaacccaagtcgtgactggctgaacccaagtctggggtatatcaccaccagccgtgggcgctcgaagatccagaactggttccgtaagcaggaccgcgacaagaatattatcgccggcaagcagattctcgacgacgagctcgagcgcatggacatcaacctgaaggacgctgaaaagctcctactgccgcgctataactttaactcgctcgacgagctgctggcggccatcggtaatggcgacattcggctcaaccagatggcgaattatcttcagtcgcagctgaagaaaccaagtgcggaagagcttgatgaagaggcgctgcgccagctgacgcagaaaacgactcgtgcgccggtacgcagtggctcgaaagaaaacggccgcgttgtggtggagggcgtgggtaatctgatgcaccacatcgcccgctgctgccagccgattccgggcgacgaaattattggtttcatcacccaggggcgcggaatttcaattcaccgtgcggactgtgaccagctcgaagatctgaagtctcatgcaccggagcgtattgtcgatgcggtgtggggcgagagctattcaagcggatattccctggtgttgcgtgtggtagcgaacgacaggagtggactactgcgtgacatcaccaccattcttgccaacgaaaaagttaacgtgctgggcgttgccagccgcagcgataccaagaatcagctggcaactatcgacatggacatcgagatctacaatccgcaggtcttgagccgggttatcgccaagctcaatcagctgccggatgtcatcgaagccaagcgcctccatggttcctaatccccgtcgtgcttaacgctttagcagcgttagcggtgcctgccctcctgactcaatgactcatgtcagcttgtcgggggctcgcttgccgcatgttgaagcttcaatgacctagggataattctcttttaaaatttacggaaagcctcatgacaacttcacttcccctgcagcgcctcctcggtattatgaaaaccctgcgcgatccggttgccggttgttcgtgggacaaagagcaaaccttcgagactatcgcaccctatacgctggaagaaacctacgaagtgcttgatgccattgagcgtaaagacttcgccgacctgcgcgacgagctgggtgacctgctgtttcaggtggtgttctatgcgcagatgggcagcgaacaagggctgtttaattttgacgatatctgcaccgctatctccgacaagctagagcgtcgccacccttacatcttcaaccagcagcagtctgctcccggcaaagacacgactcaggtgctgcttgaatgggagaagggtaaatcgcaggaacgtgccgacaaggcgctattctcagccctcgatgatattcctgccacgcttcctgctctgatgaaggcgcacaagatccaaaaacgctgtgctaacgtcggcttcgactggaccacgctcggcccggtgcttgataaggtctatgaagagatagacgaagtgatgtttgaggccaaacaggccgtggtcgatcaggataaattgggcgaggagataggcgacatgctgttcgcaaccgtgaacctttctcgtcacctcggacacaaggccgaaggcgctcttcaggccgcaaaccgtaaatttgaacgtcgttttcgccaggttgaagaaataattcgcggctcaggcctgaaaatggaagaagcgagcctcgaacagatggaagaggcctggcagcaggtcaaaatgcaggaaaaatcaggcctgaggtaaaaatcactttgctgtgatcaatatcaaaacgccgtctaacgccgctgctaacatagcgtgcatcaatgaagcagcggcatgcgtgcgaaaagtttaataaattgaattataacgcgtttttttgtcgttcatcggccgttatttcaggtgcaatgaggtaatttgctgtttttaaagggttttgatgttttcaggcctaaactgtcatggcgaggggtgccgacgggtctgcgagtgaacggagtaaaaccattgtttgtggcgcacggaaggttcgggtatactattttcccgtcctggttattccatcgtctttaaacctaacctctcaggttcagcatgacaactaattatatttttgtgaccggcggggttgtatcctctctgggtaaaggcattgccgcagcctctctggcggctattctcgaagcccgtggtttgaacgttaccatcatgaaactcgatccgtacatcaacgtcgatccgggtaccatgagcccaacccagcatggtgaagtcttcgtgaccgaagatggggctgaaacagatctcgatctgggtcactacgaacgtttcattcgcactaaaatgactcgccgtaacaactttactaccggtcgtatttactccgacgtcctgcgcaaagagcgccgtggcgattatctcggcgcgaccattcaggttatcccgcacatcaccaacgcaatcaaagagcgcatcattgaaggcggcgaaggtcatgacgtggttctggtcgaaatcggcggcaccgtaggtgacatcgagtccctgccgttcctcgaagcgattcgccagatggcggttgacgttggccgtgagcacaccctgtatatgcacctgactctggtgccttacatggcggctgccggtgaagttaaaaccaaacctactcagcactctgtgaaagaactgctgtctattggtattcagccagacgtgcttatctgccgttcagaccgttctgttcccgccaacgaacgtgcaaaaatcgcactgttctgtaacgtgcctgagaaagcggttatctccttaaaagacgttgattccatttataaaatccctgcgctattgaaatcacagggcctggacgattatatttgtaaacgtttcaacttaagctgcaaagaggccgatctggctgaatgggaacaggttatttacgaagaagccaacccaggcggcgaagtgaacatcggtatggtcggtaaatacaccgaactgccggatgcctataaatcggttatcgaagcactgaaacacgcaggcctgaaaaaccgcctgacagtaaacatcaagcttatcgattcacaggacgttgaaacccgcggcgtcgaagtactgaaagacctggatgctatcctgatccctggtggtttcggttaccgtggcgttgaaggtaaagtgatgaccgcacgctatgcgcgtgagaataacattccttatctgggcatttgtctgggtatgcaggttgcgctgatggagtttgctcgtaacgttgccggtatggaaaacgcgaactctactgaatttgtgccagactgtaagttccctgttgtggccctgattaccgaatggcgcgatgaaaacggcaacgtcgaagtacgtaccgaagagagtgatttaggcggcactatgcgtgtgggtgggcagctgtgtcacctgaccgaaggaagcctggttcgtgagatgtacaacgagccaaccatagttgaacgtcatcgtcaccgctacgaagtaaacaacatgctgttgaagcaaattgaagcagccggtttacgcgttgcaggtcgctctggcgataagcaactggtggaaattatcgagttgccaaaccacccgtggtttgttgcttgccagttccatccggaatttacgtcaacgccgcgtgatggtcatccgttgtttgcaggctttgttaaggcagccggtgagtatcagaagcgtcaggtaaaataaaatataagaccagaggtgcgctgccggagtgcggcgcatcctgagtccgaagctttagttaacttgtactgaggaaatcctaatgtccaaaatcgttaaagtgctcggtcgtgaaatcatcgactcccgtggtaacccgaccgtagaagctgaagttcatctggaaggcggtttcgtaggtctggctgctgcaccatcaggtgcgtcaacgggttctcgcgaagctctggaattgcgtgacggtgataaatctcgttttctgggtaaaggcgtaactaaagcggttgacgcggttaacggccctatcgctcaggctctgcaaggcaaagacgcaaaagaccaggctaacatcgacaagattatgatcgagcttgacggtaccgaaaacaaatccaagttcggtgctaacgcgattctggcggtttctctggctgcggctaaagctgctgctgcttcaaaaggtctgcctctgtacgcacacattgcggaactgaacggcactcctggtaaatattcaatgccactgccaatgatgaacatcatcaacggtggtgagcacgccgacaacaacgtcgacatccaggaattcatgatccagcctgtgggcgcgaaaactctgaaagaagccgtacgtatgggctctgaagttttccacactctggctaaagttctgaaatctaaaggcatgggaactgctgttggtgacgaaggtggctatgcgcctaacctaggttctaacgccgaagccctggctgtaatcgctgaagcggttaaagcagcaggctacgagctgggcaaagacatcactctggcgatggactgtgcagcttcagaattctataaggacggtaaatacgttctggctggcgaaggtaacaaagccttcacttctgaagagttcactcacttcctggaagacctgactaaacagtacccaatcgtttctatcgaagacggtttggacgaatctgattgggacggttttgcttaccagactaaagttctgggcgacaaaatccagctggtgggcgacgacctgttcgttaccaacactaaaatcctgaaagaaggtatcgaaaaaggcatcgttaactccatcttgatcaaattcaaccagatcggttcactgaccgaaactctggctgcgatcaaaatggcgaaagatgctggctacactgccgttatctctcaccgttcaggcgaaactgaagatgctaccattgccgacctggcagtcggtaccgctgcgggccaaatcaaaaccggttctatgagccgttctgaccgtgttgctaaatacaaccagctgattcgtatcgaagaagcactggcggctacgggtactcctgccccgtttaacggtctgaaagaagttaaaggtcagtaatttctgaaccctggcttcacaaaacccgcttcggcgggttttttactttattagaaaccccctttattagccgagcaacgcggtgaatcgaagatttctgaaagttgtgcgattccgcgataggtttggcgcaacccgcgatgtctgcgataatagccgttggctccttaacactgagatacacatgcagtacccgattaacgagatgttcgaaaccctgcaaggggaaggctattttaccggcgtgccggctatttttattcgtttacagggctgcccggtgggctgtagctggtgcgatacgaaacacacctgggaaaaattcgccgatcgtgaagtcgatatgcagcgtatcctggttaaaaccgaagagagcgacgcgtggggcaatgccaccgccgagcagctgcatcaggttatcaagaatcagggttggacggccaaccacgtcgtgataaccggcggtgagccgtgcatctacgatttgcagccgttgaccgagcttttggaatcattgggctatagctgccagattgaaaccagtggcacgcatgaagtgcgctgttctgccaagacctgggtgacggtttctccaaaagtgaatatgcgtggcggttacgacattctgccgcaggctctgcagcgagcagacgagattaagcatccggtcgcacgccagcgtgatatcgatgcattggaagtgttgcttgcgacactgaccgaccagaaggcgcgtattatcgccctacagccgatcagtcagaaagaagaagccactaaattgtgtatcgcgacgtgcatcgccaaaaactggcggttgtcaatgcagacccataagtatttaaacatcgcctaattttcttcgcccttgtcactgtggcggcgttgcttcgcttgctcgcccgaatcactgacttatgtcagctcatcgggacttgcgcactttgcgccttgccacagcaacaagggctttgaaaagaggttgggcgagcagtttaaccgcgataaacgcagccggcggtgcaggtttctttgatgcgcaccgcgctcagcaggggaagctgaggcttcatcttgttccagatccattcggcgagcacttcgctggttggattttcaaggcccgggatatcattgagataatagtgatccaggctgtctagggtcggtttaaacgcggctttcagctcagcaaaatccatgacccagccggtgtgtggatcaacttcgccggtgatttccagacgcacggcaaaagagtgcccatgcaggcggccacatttatgccctgcgggaacgtgaggcaggtgatgagcggcttcgaacataaaatctttaaataatgtagtggtcataacactgtctcgttgactgcaaaaaacgcggcatattaacggaatctggccgcttacgccatgacttatctgctctgcaaatagacagatattgagctttggtgtatttactcaatgtgactcgatgacttacattgggggcgttggatattaacctattgagatagtgaatgattagagcgctgcgttgggccattttgttgctggtagtttctgcaacagctaaagccgatgaactatcgatcccccataaattacccactgcgggtgatgcaccggcggtaaatacccctgtgcctgcggctcctgacaaggcagcatcggctacaccgcaaactgcgcccgctgcgcctgctgcgtcatcgcctgcggtgacgccgtctgcggtttccgctgcaaaagctgcccctgctaacggtcaaacggttacgacgcccgcagcaccggccaagcctgctgtctctaaagcccccgctaagcccactgggatagtgttaaaaaccctggccgatggcaccggcagcttttacttcccggttggtggcaacaaaaaacctgtcgaagtcttcacctatcagcccgccggtaccgacgccagcaccccggtgattatggcgatgacgggtgtcgatcgtaacgcatccacctaccgcaacgactggatcaaaatcgccgaccaataccatttccgcatcgtggttccgcgttttaccgatcaggacttccccggcagctatggctataacttgggaaatatccaggatccgaaaacgcatcaccggctgcctaagtcgcagtggaccttcaccttggtgaatgacattttcaacgccatgcgccagcaaggaatcaccactcagtctcagtattatctgtttggcaacagcgcgggctgccagttcgttcaccgtatgctgaccctgctgccgcagccagaggtcaaggccgctatttgctccgccgctggctggtggacgctgccggataccgaccagcgctggccttacggtctgcgcgcctcgccgataaaagtcagtcagtctcagttggccgagtactttgccaaacctattctcattgcggtggggaccaatgacgacgatcctgaaaatcgtctgctgcgtcactccaagggcgcgatggcgcagggcgtaacgcgtcttgaccgtgccgagaactttttcaccacctctcagcagcaggcagagcaaaactacatgccgtttaactggcactttgtggcgcttccggatatcggccatagcgatatcaaaatgtcgatttacgccgcagggcagttctcgcgcttcgagcagcagcacgagttcaatccataacggactgatgttctgcgccactttctgacggcaagcctgtgaactcaaagaaatttttaaccccgcaaatgcggggttttctcatctagactcctgaatttacccccgatgaataaacctgatttttttattagttatttcagtagcctatagctgcggctttaccacttttaccgatagtttctacctgaaaaaacacttagtcattatggttatttaatattcccatcacttatttaattgttatgatcctgctggttaaccttacaagctatcaaattcttaatcatttaatggcccgctgaaactggcttaagcaataagggaattcgtaccgcgatgacgactcaggctcctcctctatctttgcttccgttaaccccggagcaaatgacacggctgcaatcggcgattggtgactattcgccgacccagttagcctggctttcaggttatttttggggattgactaaccagcagtcgggcgctgtggcggcacctgctccagtcgctgcggcggcatcgattacccttatctcagcgtcccagaccggtaacgcacgccgtctggccgagcagctgcgcgatgcgctggttgcggctaagcttaacgttaacctggtcaacgccggtgactacaagttcaagcagattggccaggaaaaattactgctgatcgtcgcgtctacacagggagagggcgagccggcggaagaggctgtggcgctacacaagttcctgctttccaaaaaggcgccgcaaatgtccgatacggccttcgcggtgtttggcctgggtgacacttcttacgaattcttctgtcaggcgggtaaggactttgatacccgtttgggtgaactcggcgcagagcgtttgctcgaccgcgtagacgccgacgttgagtaccagcaccaggccgctgactggattcaaaatgtggttgaggtactgaaaaagcgcgtacctgccgaaggtcctgccgcgctggcggctaccgtcgctggaaacgtgaatcagctcgacagcagcccttacaccaaggaacagccgctgacggcgctgctttcggtcaaccagaaaattacgggtcgcaactctgataaagacgtgcgccatattgaaattgatttaggcgattctggcctgcgctaccagccgggtgacgcgctgggcgtgtggttcgaaaacagtcctgctctggtgaaagaactgctcgagctgctgtggctgaaaggcgatgagccggtcgaagtccacggcaaaacgctcgcgttgagcgatgcgcttacgcatcatatcgagctgacgcagaacaccacggtcattgtcgacaagtacgccgccgtatgtcgcgacgccgacctgctggcgctggtttccgacaagagcgcgttgcaacagtttgcacagaacacgccgttcgtcgacatgattcgccgtgcaccgaccgagcttcagcctcagcaactggttgatatgctgcgcccgctgacgccacggctttattctattgcctcttcacaggcggaaaccgacaccgaagtccacattaccgtcggcgtagtgcgttacgaaattgatggccgtgcgcgtaccgggggagcgtcgggctatcttgctgacagactgcaagaagacggtgaagtccgcgtcttcatcgagcacaacgataacttccgtctgccggccgatcctgaggcaccggtcattatgatcggcccgggcaccggtattgcgcccttccgcgcctttatgcagcagcgtgataacgacggtgcgggcggtaaaaactggctgttctttggtaatccgcactttaccgaagatttcctttatcaggttgagtggcagcgctatgtcaaagatggactgttaacccatattgacctggcctggtcccgcgaccagtctgagaaagtttacgttcaggacaagctgcgtgccaaaggcgctgaagtgtggcaatggctgcaggaaggcgcacatatttatgtctgcggtgacgccaaccgcatggcgaaagacgtggagcagacgctgcttgagctgattgccgagcacggttccatgagccttgaagacgccgatgaattcctgagcgagctgcgttttgaccgtcgttaccagcgagatgtctattaatgagcactgaaactatgaacgaaaaacatcccggacctttggtggtcgaaggcaaattaaccgacgctgaacgtcttaagaaagaaagtaactttctgcgcggcaccattaccgaggatctgaccgacggcctgaccggcggtttcaacggcgacaacttcctgctgatccgtttccacggcatgtaccagcaagacgaccgtgacattcgcgccgagcgtgccgagcagaagctcgagccgcgccatgcgatgatgctgcgttgccgtctgccgggcggtgtgatgaccccgagcagtggctcggcatcgataaattcgccgcagacagtacgatttacggcagcattcgtatcaccaaccgccagacgttccagttccacggcattctgaagcctaacgttaaaccggttcatcagctgctgaacaagctgggccttgacgcgctggcaaccgccaacgacgtgaaccgtaacgtgctctgtacctctaacccggtagagtccgagctgcatttcgaagcctggcagtgggcgaagaagatttccgagcatctgctgccgcgtacccgcgcctatgccgaagtgtggctggatcaggaaaaggtcgagactaccgacgaagagccgattctgggggcaacctatctgccgcgtaagttcaagacgacggtcgttatcccgccgcagaacgacgtggacctgcacgccaacgatctgaacttcgtggcgattgccgacaacggtaaactggttggctttaacgtgttagtgggcggtggactgtctatcgcgcacggcgataagacgacctatgcccgcaccgcaagcgaactgggctttatcccacttgaaaatacgctggcggtcgctgaggcggtagtaaccactcagcgcgactggggtaaccgcaccaaccgtaagaacgccaagaccaaatacaccttggaacgcgtcggcgtcgagaccttcaaggctgaagtcgagaagcgtgcgggtatcacctttggtgacgtgcgtccttacgaattcaccggccgtggcgatcgcatcggttgggtgaagggcattgataaccaatggcacctgacgctgttcatcgaaaacggacgtattctggactacccgggtcgtccgctgaaaacgggtctggccgagatagcccgcattcataaaggcgatttccgtctgaccgcgaaccagaacctgatcgtggcgggtgtcgatgagaaagataaagacgctatcgaggcgctggcgcgcaatcacggtctgatcgatgacggcgtgaccgagcagcgtaaaaactcgatggcctgcgtgtcctacccaacctgtccgctggctatggccgaagcagagcgcttcctgccagagtttgtgaccaaggtagaaggcatcatgcatcagcacggggtcggcaaggaacacatcgttctgcgcgtcaccggttgccctaacggctgtggccgtgcgctgttggctgaaatcggcctggtaggtaaagcgatgaaccgctacaacctgcatctgggcggtaaccgtgagggtacgcgtattccacgcatgtatcgtgagaacatcagcgatgtcgagatcctgacgattatcgatgagctggtcggacgctgggcaaaagagcgcgagaccgatgaaggctttggcgattacgtgatccgcgcaggcatcatcaagccggtgctcgatcccgctcgcgatttttacgactgacaggaggcgatatgagcttactctccctaacagaactgaatgcactgcccaagtccgggcaggcattggcactggccgaggttaacggccagctggaaaaactctcggccgaagagcgcgtgagctgggcgttggaaaatctgccgggcgagtttgccttgtcgtccagcttcggtattcaggcggcggtgtgtctgcatctggtcacgcgtcagaagtcggatattccggtgattctgacggataccggctatctgtttccggaaacctaccagtttatcgataccctgactgagcaactgaacctgaatcttaaggtttatcgcgccgagcactctgccgcatggcaggaagcgcggtacggcaagctgtgggagcagggcgttgagggcatcgagaaatataacctgatcaacaaggttgaaccaatgaaccgcgcgcttgaaacgctgggggcgcagacctggttcgccggtctgcgtcgtgagcagtcgggcagccgtgccaatctaccggtgttggcggtgcagcgtggggtgtttaaaatcctgccgatcatcgactgggacaaccgtcagatcttccagtatctaaagcagcacgggctgagctaccacccgctgtgggatcagggctatctgtccgttggcgacactcacaccaccaaaaagtgggaagaggggatgaaggaagaggaaactcggttcttcggccttaagcgtgagtgcggactgcacgaataatcagttttcaaatcccccacacgatgggggatttttttttaacgtccctcaggcgtcgctaactctttcagtaaaggcagcagaattctcacgctgtctttttcacgtctggcgatgcgccctggcagatagcggtcaagatattgcagattgtctatccgcccctggaagcggctggtgccggccgggaagtgagaacttatcggacgctgctgctgcccatcctgtttccccagtcgccagtcgctggcggagaccagcatcagcggaatatgctggtcgtccagcgccttcagcccctcgcagcagctggttcccgacgggctgcgtgcggcgtcgatgcccaggcgacgcgcgatgctcagcgccttgtccctcgagagcttggcgacgacggacgaggtattcacaccgctgttgaaatacagtcggtcaccgacaatcagcgaattcagattgatgaccagcagcgtgcgttttttctcctccggcgtcaggctgtcgagatagtcttttgcaccttgctcaccggcctcctgtgcactcagggcgacgaaacgcaggctgtagtgcgtcgactcttggctcatccgctgcgccagctcgagcatagcaccgacgccggaggcgttatcgtcgacgccctgtagcgtcaggccgccgagattctcgtcgctgtccttatcgctctgcggcagataggtatcgaaatgcgccatgaccactatctgttgcggtacttcgcctgcgcggtcggctattactgaggtggcgtgaacgctgtgccagttctggcggccgtcctgactggtgtaaagataacgagcttcaaacgcgcgcagatggctctggtagcccattttgttcagcgtctgattaaggtaatcggcggcgatgatttcagccgggctgccggccattcttcccggaaaataggtggcaatgtgtcgcgtctgctgttccgccatgtggccgagtggcggattttttaagggatgtcccacggcagagaccgcatacaagccgctcagcgtgagtaacagtgctgaacgcgctacgtggcggagagaaagcatactaaaaatccttatcaggcgtccttgaaaagtctgcccgtagtatgcgattcggcgacgaaattaacaatttacagttttctcaaaacgagctttttactggctatattccattctggaactaatcattccatttcgtcatttcatctcgataacggccacgccgtatagtcatattatcgatttgtttatgcataaaggttgttgtggactatctccctatatttgccgacctgaaacaacgtccggtactggtcgttggcggtggcgaagtggctgcacgcaaaattgatcttcttctgcgagcaggtgcggaagtgagagtcgtcgcacaggcattgtctggtgaagtggagtctctgcaccagcagtctgacgttctttggttgtctcagtcttatcagcctgagcagcttgatgacgtatttctggtgatcgccgcaacggatgacactgagcttaacgcccgcgtgtatgaagacgctaatcagcgccgcgtgctggccaatgtcgttgacgatcagcctaaatgttcatttatttttccgtccattgtcgatcgctcgccgatcgtggtggctatttcgtccagcgggcaggcgcccgtgctggccagaatgctgcgtgaaaaactcgaaacgctgctgcccgccagcctcggtaaaatggcggaaatcgccggtagctggcgtgaacgcgtcaagcagcgttttaactcgatgtctgcccgtcgtcgtttctgggagcaggcttttgacggccgcttcgcttcattgaccgctgggggcagttcgatgaggcggagcaggcgttaaagcagctgatggatgcgccggacgaggcgactcatcaggggatggtgacgctggtcggtgcgggtcccggcgacgtgggacttctgacgctgcgtggattgcaggtcatgcaacaggccgacgtggtgctgtatgacttcctggttagcgatgaggtattggacctcgtgcgccgcgacgcggagaaaatctgcgtcggtaagcgtgcgggcaaccatctggtgatgcaggaagaaaccaatcgactcttggtcgacctggcgaagcagggaaaaaaagtggtcaggctgaaaggcggtgacccgttcatttttggtcgcggtggcgaagagcttgaagtggtcgccgcggcaggcattccttttcaggtggtgccgggaattaccgccgcagccggggcaacggcctatgccggtattcctctgacgcaccgcgaacgcgcgcagagcgtgatgtttattaccggccaaatccgcactgacggcaatggcctgcaatggtccgaactcgcccgcgggcaacagacgctggcgatttatatgggcgcaatgaaagcctcggacatcagtcatcatcttatcgcccacgggcgcgccgccgaaacgccggtggcggtgattggtcgcggtacgcgcgcagaccaacaggtgttgaccggaacattgcaaaatttagaacaattagcccaacaggcgccgtcgccggccctgctggttattggtgaagtggttgaacttcatcacaaactcgcctggtttgggcatcatccagagactgccggtgcacaacgcccgacggtcgtgaatttggcttaaggatctgatatggacgaaaaacgactcacccatttacgacagctggaggcggaaagcatccatatcatccgcgaggttgcggctgaattcgctaacccggtgatgatgtattccatcggtaaagactcctctgtgatgctgcatctggcgcgtaaggccttcttccccggcacgctgcctttcccgctgctgcacgtcgatactggctggaaattcaaagagatgtacgagtttcgcgaccgtacggcgaagaattatggctttgagctgctggtgcataaaaacccggaaggcgtggcaatgggcattaacccgttcgtacacggcagcgccaagcacaccgatatcatgaaaaccgaaggcctgaagcaggcgctgaacaaatacggttttgacgctgcctttggcggtgctcgtcgtgatgaagagaaatcgcgtgccaaagagcgtatctactcgttccgcgatcgtttccatcgttgggatccgaaaaaccagcgtccagagctgtggcacaactacaacggccagatcaacaagggtgaaagcatccgcgtcttcccgctgtctaactggaccgagctggatatctggcaatacatctatctggaaaacattgagattgttccgttgtatctggccgcaccgcgtccggtactggagcgtgacggtatgctactcatggtcgatgacgaccgtatcgagctacagccgggcgaggagattgaagagaaaatggtccgtttccgtactctgggatgctggccgctgaccggtgcggtggagtccgaagcgcaaacgctgccggaaatcatcgaggagatgctggtttccaccaccagcgagcgtcagggcgtgccatcgaccgcgatcaggcgggttcgatggagcttaaaaagcgtcaagggtatttctaaggagcacggactatgaataacgcaattgcacaacaaatcgctgagcagggcggcgtagaagcttatctgcacgcacaacagcacaaaagtctgctgcgcttcctgacctgtggcagcgtggatgacggtaaaagtacgctaatcggccgcctgctgcacgacacacgtcagatttatgaagatcagctgtcttcactgcacaatgacagcaagcgtcacggtactcagggcgagaagattgacctggcgctgctggttgacggtttgcaggccgagcgtgagcagggcattactatcgacgtggcttatcgctacttctcaactgaaaaacgtaaattcatcatcgccgataccccggggcacgaacagtacacccgtaacatggcgaccggcgcatcgacctgcgacctagcaattttgctgatcgatgcgcgtaaaggcgtactggatcagacccgccgtcacagctttatcgcaacgctgctggggattcgtcatctggtggttgcggtcaacaagatggacctggtcgactacagcgaagaggtattcgagcaattcaagcaagactacctgaccttcgccgagcagttgccaaccgatctggacattaaattcgtgccgctttccgcgctggaaggcgacaacgtggcgtccgaaagccagaagatgccttggtacactggcccgacgctgctcgacgtgctggaaaccgtcaacatcatcaacgtgcgtgaacagcagccgatgcgtttcccggtgcagtatgtgaaccgtccaaacctcgacttccgtggttatgccggtacgctggcctccggttccgttcgcgtagggcagaaaatcaaggtgctgccatcaggcgttgagtccaccgtggcgcgtatcgtgaccttcgacggcgacctgcaggaagcctgggccggagaggccattacgctggtgctggacaccgaggttgatatcagccggggtgacctgctggtggacgccaacgagacggtaaaagcggtgcagaacgccaaggttgacgtggtgtggatggccgaacaaccgctgagcgtgggccagagctatgacatcaagattggtggcaagaagacccgtgcgcgcgtcgagaacatcgaatatcaggttgagatcaactcgctgactcaacgcgtggtcgacagcctgccgctgaacggcatcggtctgattgagctggccttcgacgaaccgctggtgttggacaactatcagcagaacgcagtgaccggcggcatgatctttatcgatcgcctgagcaacgtaaccgtcggtgcgggtctggtgcgagaagcgcttgaacaggtttatgaagaaaaaggggcttacagcgccttcgagcttgagctgaacgcgctggttcgtcgtcatttcccacattggggtgcgcgcgacctgctgggtggcaagtaatatggcccttcaggacgaaaatatcgtctggcatccgcatgcggtgacgcgtgcggatcgcgaaaagcagcatgggcatcgcggcgtggtgctgtggtttaccggcctttcagggtcgggtaaatccacggtggcaggcgcgctggagcaggcgcttttcagcctcggcgtgagcacttatcttctcgatggtgacaatgtaagacacggactgtgtcgcgatttgggcttttccgatgacgacagacgtgaaaatatccgccgcgtcggggaagtagccaagctgatggtagacgccggacaggtggtgcttactgcgtttatctcacctcatcgcgccgagcgtcagatggtacgtgagttgttggataacgggcagtttatcgaggtatttgtcgatacgccgttggctatctgcgaggcgcgtgaccctaaggggttatacaagaaagcgcgcgcgggagagctgaaaaacttcaccggcatcgactcggtttatgagccgccgctggagtctgatattcacctcgatggtgaacaattagtaacacatttggtcccgcaattattagctgtgctgcgtggtcgaggtattatcaatccctgaatgttgctggcaaaacgccgaagagcgtgtcggtgtacagcgaaacaacaggggttgaaccatgcaaacgttaagtcagttattcatcgacatcaagcgtaagaagccgtcggtaaaggagagcgaagaaccttcctactccatggtcggcggctgcaccggatttgtgttcttctggctggcgttttcccttccttttgtcatctacggctccaatacgctgtttttcctgctctatacctggccgttctttctggcgctgatgcctatctcggtgcttatcggtatcgccttcagcatgctgttcagcggtcgtctgtggaagactctgccgttgaccggtctggtggtgttttgcgtattttggaccgtgttcaagtttctcagcggctggtaatcgcctcctcgttctcatttttctccgcctttctgcgcagcttttaatcgtttttatcctcacggttgtaaaccattgtgtcatttggggacttattcttaacttaactcctaatctgttcgccaatttccccttcagtgtggagtcaaagtgaaagttgtgggatgattgagcggctatttcaggggcggaatgggcaaattaacgctgctattattgattattctaggctggttgcagtattcactgtggctgggtaagaacggtattcacgattacgtgcgggttaacgatgatgttgaggtgcaacaggccagcaacgtcaaacttaaatcacgcaatgaccaactcttcgcagagattgacgaccttaatggcggtcaggaggcgattgaggaacgcgcacgcaatgagctgggcatgatcaagcccggtgagagtttctatcgcctggtgccagaccaaaacaagcgcaatcaggcttccaacacaacgcaagtaagaatcaacaataatccatgagccacacagccgtctcctcggccgatatcgtcgcggtgttgcccgccgccggtattggcagccgcatgcaaagcgaacttcctaaacaatacctgaccatcgaagggaaaaccctgctcgagcacgctatcaatgcgctgctgcgcagtccccgcgtcaggaaagtggtggtcgctatcagtcctcaggacacctggtttgcccagttgcctgttgcgcaggacccgcgtattcaggcggtgaccggtggcgcgcagcgtgccgattcggttatggccgggctcaagcatgcgggagacgcgtcctgggtgttggttcatgacgcggcacgtccgtgcctgcatcctgatgacttgacgcgactgctggctatcagcgcaacgagtaacgttggcgggatccttgccgcgccggtacgcgacacgatgaagcgcggtgaaccggggattgagaaaatcgcccataccgtcgaccgtcaggatttatggcacgcgcttacgccgcagtttttcccattgggtctgttaaaagcctgtctggaacgtgcgcttgatgaaggcgctaccgtgaccgacgaggcctcggccatcgaatactgtggttatcatccgcagttagtgccgggaagatccgataatattaaagttacccgtccagaagatctggcactggcagcattctatttaactcagttacaccaagaggagagcgcatgatgcgtatcggtcacggttttgacgtacataaatttggtggcgaaggccctctggtgatcggcggcgtgcgtatcccttatgaaaagggtctgctggcacattcagacggcgacgttgccctgcatgcggcgactgatgccctgctcggtgctgccgcgcttggtgatatcggcaaactgttcccggataccgacccggcctataaaggtgcagacagccgcgagctgttgcgtgaagcctatcgtcagattaaggcgaagggctatcgtctcggtaacctcgacatcaccatcatcgcgcaggcgccaaaaatgctgccgcacgtgccgcagatgcgtgtcttcatcgccgaagacctgggctgccacatggacgacatcaatgtgaaagccactacgactgaaaagctgggctttaccggccgcggcgaaggcattgcctgtgaagccgttgccctgttgatcaaggcctgatgcaatggacatgaataatctgacctggctgtacggcaagccgctttcgaacggtacgctgaaagccaatccagaagatttcatcgttgaggaagaccttggctttgagccggacggggaaggggagcatctgctggtgcgcatccgcaagaccggctgcaacacccagtttgtcgccgagcagttggcccgtttcgccggtgtgcatccccgttcggtaagctatgcgggtcttaaagaccgccacgccgttaccgagcagtggttctgtgtgcatttgccggggaaagaaaaccctgacctcagccagttccagctcgaaggctgtgaagtggtgcgctttgctcgtcatctgaaaaagatgcgtatcggtacactgaaaggcaatgcattcacactggtactgcgcgatttgaccgaccttgcagacattgagcagcgtctggagaagattgtgttacagggcgtcccgaactattttggcgtgcagcgctttgggcgcggcggcaataatctgctgcaggcgacccgctgggcgaaggacgaaatccgcgttaaagagcgtcctaagcgcagcttctatctttctgcgagccgtagcgcgatgtttaacattgtcgccagccagcgtttggcaaaagggctgatgagtgaggcgatgctgggtgatgcgcttcagttgagcggacgcggcagctggtttgttgccagggaagaagagctggagtcggtgcagtcgcgcgtggccagcggtgagctgttgatcacggcaccgttgccgggtgatggtcctttgggttcacagcaggatgccgaagccttcgagctgagctgcattgaggaccagacgccgctgctgtctctgctcaaacgtgaacgtgttgatcctgcgcgccgtgccattatgctgcacccgcagaacatcgtctggaaaccgctggacgaggcgacgctggagcttaagttctggctgcccgcgggcagttttgccaccagcctggtccgtgagttgatgggacagggtgaaggcgacgcggatatcagcgaataatcttctgcgcaacaattacccctcacgaggagggggttcaaagttgacatagaaagccggctagccggctttctatgtttttgtactctaagaatttacttcttgtcccacgcctgttgccatgcgctgccggtagaaggcgcataggcccacgccacgccgctacaccatggggtataaggcgagggcttacactgataggcgttgccgtcagcggcggtaacgatgtcaccggcctgataatgggtgccttctttgtaagccgggtgcgcaccaccgttgtcgtcatttttctctttggtggtaacggacagcatctcggaaaggccggacttattgcctgagatatccgtcgcacttacctgatagtggtaagtggtatccggctgaagatttttgtcctcaacgcggatttctttcacgttaaatgccagtttgccattgcggaaaatctcgtaacccaacactttcacattatccgttgaggctttccacgtcagcgtcacgctattttgtgcaacctgcgttgctaccaactgagtgggaatggtgggtgcctgggcgtcgtgtgccggggctttttcggtcttgatgctcagaacatcgctggcggcagaaatattgtttgcggcgtcgacggccttgacggtgtaatgatactcgacgttttcctgtaaattaacgtcggtgtattcatgggagggagcatcggaaattttgacattattacgatatatttcataatgatgaacgcctgcggcgttgtcgtctgtcgaggccgtccaggtcagatgaatgctgctggcggtcgcttctccatgcagatgggtaggtacgctcggcgccgtggtatcttcgtctggcgtcacgatagcattttcgccgtaaatcaggtcggtgtaatctttacggaactggccgttgaagccctgatgagagacattttcaccttcatcccagtttatcgaccaggtcatcacccctcttaacggcatgccttctttttctaaatctttgaaaacgcgatacacgtcctgcggcgttttgacaaaacctgttgcagccgctgagttattacttggcaagccgataactaatttattggcagggattttcactgctgccttaccgtgtgggttggcaatcagttctttagtaaagtgataaaggaattcatattttttagagtcatcatcctggcgataattaacccaatagacgccgtctgaggtgtcttcaggttcaaagccaatcccgaacgcgccctggttataatattgcggagcaataaaatcatagtagccatccagatttttaatatagtttatatactctggggtaatttcggtcagataaggaatttcagggccatactgataataaaatgcttaccctgattttcataatgtttgcggactattttcagtgcagcgggaataacggtctcattatcagctttcttgatagccgcttgctcaaggtcaatatccaggccgtcgaaaccgtaggtctcgaccaggcgtatgatttcattggcaaacttttgcgtatcgcctttggcagcgtgcagttcaatgtgcgcatccgcaccaccaagagacagcagaacagcctgtccacgctgatttagctccgaaatctcggtgcgaaagctttgctccgttccatagtaaggggtaaaggtcggcatgctattgtcattggttgacttcatgaacgagaccatcacgacgttaaactctttaggagtatctttaaggttcatttttttgggatagccctgcgcatagtcccagagaatccctgatcccagttatgccaatagccgaccatcaactttttaccttcaattgaaggcatggtagccgcatagtccgttgccgcgaaagtcacgtttgagaaaccaataagaccgcatagtgcgagacaggcggcgactttggattttagcattatatttttcatgttctctctgtttgaattttcgtgcagcaaaattcattatgaaattaaaatagataaattaagaatgggtgaaggggaaatataaagtccggtgtcggtgttcttatatttcgcgtgcatatattacagtgggttgtggattgtttctctaagggaagggccggatatttctcgcatttattaatacttcaatgcttatagatagagaatattctctatttgatggcagtgcgcagtgaacgtaatgaaagtcatttattttatatttattaaccaaacggctgcgctttcctacaagcctgttttttcactgtagaaacccagctgacaacggttataatcatcactggtttgacggcaacgggattgcgtcgcagcgtgaatgcgcgatcgttgtgcaactaaatgataaccagaggattttctttgcaatctactgagaacaaggcatgacatctttgatacggatattgttgagtaatgatgacggtgtgacggctcccggtatccaggcgctagcttctgcgctgcgcgaattcgccgaggtgacggtggttgcgcccgacaggaatcgcagcggcgcatcgaacgcgctgacgctggactcacccttacgtattcaaacctatcccaacggtgacactgctgttattaacggaaccccaacggactgcgtctatctcggcgttaatcggctgatgcagccgcgcccggatattgttgtctcaggcattaacgctggcccgaatctgggggatgacgttatttattccggtaccgtcgctgccgcaatggaagggcggcacttgggctatcctgcgcttgccgtgtcactcgacggccatcagcattacgataccgctgcggctatcacctgccgcattctgcgcatgctggcgaaagagccgctgcgcaccggtcgaatccttaatatcaacgttcccgacctgccgctcgaaagcattaaaggctttcgcgtgacacgctgcggtagccgtcatcctgcagaacaggtattttgtcagcaggaccctcgcggccaggatatgtactggattggcccgcccggtgaaaagtttgatgtcgcaccggataccgattttgccgccgtggcacagggctatgtctccattacccctttgcacgtggacctgacggcctatgcggcgcaggacattgtcagaacgtggttagccaaagccgaggtgagcgggaatggtgattaagccgatgtacaatttgctcgagcaactgcgcaagctgggcatctctgatgagccgctgctacaggcgattgaaacggtcccgcgtgaacgcttcgtcgatgaagcctttcagcacaaggcctatgaaaataccgctctgcctatcggactcgggcaaactatttcccagccttataccgttgcccgcatgacggagctgctgcgtttaacacctacgtcgcgcgtgttggaaatcggcaccggctcgggttatcaaaccgctattcttgctcatttggttgagcacgttttttccgttgaaaggattaaagggctgcaatggcaggctaagcgccgcctcaaacagctggatctgcataatgtctcaacgcgccacggcgacggctgggaagggtggccttctcgcggccccttcgatgccattatcgtcaccgccgcccctcccgaaatccctcaggaattactcactcagcttgcggaaggcggggtgatggttttgccggttggagagcaaaatcagactttgcaacgtatccaacgacgtgcgaatgattttactatcgaaaacatcgaggctgttcgttttgttcccttggtgaaaggtgagctcgcctgagtgcgtttttcgtactattcgggactaaacccctaaaatttaaatacaactgacttatggtgataacgttgcgttgttgatagcattcactacagttttttattgccacagtttttttaactatcgccatcggctgatttcgcgtcagccagcatgtaaacggcccgcctttcgttgttaaatggttcctaatggatccaggcagcgtttggcctgagccgcgatagattctgatattgccgtcatgggggagttatgagcacgggaagcccaattaaaaccttaagccgcattgcggtatgtacatttgttggcgcctggcttgcgggatgttccaataatgcctcgacgactgctccaattagcaccgtaaacggtggcggaggcatgctccgcgcccctcaaggggtcagattactccgaattccagcgataatgccccgatgattaatgctcagggacacatcgtttataaccgcagttataacagtattccgaaaggcagctacagcggaagcacctataaagttaagcgcggcgacactcttttttacattgcctggataaccggtaatgacttccgagacctggcggcccgtaacaatatcgccgagccgtatgcgcttgaagtaggtcaacgtattcaaattaataacgtttctcgcaccgcgagcagcggcggtatgttggccgcaacggatgcaacgcaggggggattcctaaagccccttcaagcggcatgatgcagggtacagtggttgcatctcaaccaactaccacgtattctgaatcttcaagtaaacagaatgtaggtcggatgttgcctacagcgggcgttgtcgcaacgacgacggcacctgttaccgcaccgagcgctcccgtcgaaagtaccacagacaatggcggcccagtttcctcttggagatggccgactgaagggagaattatcgataatttctcagcctctgagggggaaataaaggtatcgatatcgccggttcacgtggacaaccagtattggcaaccgccagcgggcgagtcgtttatgccggtaatgcgctacgtggctacggtaatctgatcatcattaaacacaatgatgactacctgagcgcctatgcacacaatgattcaatgctggtccgggaacaacaagaagtgcaggcgggtcaaaaaatagcgacgatgggtagcaccggaaccagctcagtaagattgcattttgaaattcgttacaaggggaaatccgtaaacccgctgcgttatcttccgcagcgataagccgggcagagtcactgattctgctcttgggaccacgggtaggagcagcttatgagtcagaatacgctgaaagttaacgagttacatgatgatgtagatttcgatgagaacagcgctgaagcctttgacgaagagaaagcaaccgtcgaggagtctgttgatagtgacgctcttgaagctgaagaggagttactgtcacaggctgtaagccaaagagtgctggatgcaactcaactgtaccttggtgaaattggttactctcctctgcttaccgcagaagaagaggtttattttgcacggcgtgcgctgcgaggtgacgtaccatctcgccgccgcatgattgaaagtaacctgcgtttagtggtcaagattgcgcgccgctacagtaatcgcggtctggcgctgctggatctgattgaagagggtaacctcggtctgattcgtgccgttgagaagtttgaccctgagcgcggttttagattttccacttatgcgacatggtggatccgtcaaacaatcgaacgggcgatcatgaatcaaacccgtaccattcgtttgccaattcacatcgttaaagaactgaacgtttatctgcgtactgcacgtgaactggcacacaagctcgaccatgagcctagtgccgaagaaattgcagaacagctcgacaaaccggtccacgacgttagccgtatgctgcgcttgaatgagcgcatcacctccgttgacaccccattgggtggtgactcggagaaggcgttgctggacattctggccgacgagaaagagaacggaccggaagacaccacgcaagacgatgacatgaaacacagcatcgttaagtggctgttcgaactgaatgcaaaacagcgtgaagtcctggcgcgtcgtttcggcctgttgggttatgaagcggcaactcttgaggatgtaggtcgtgagataggcctgacgcgtgaacgtgttcgtcagatacaggttgaagggctgcgtcgcctgcgtgaaattctgcagggacaaggtttgagcatcgaagcgttgttccgtgaataatcatcggtaaactgtacaatcgaagcaacacaaaaaggggagcaactcattgctccccctttttattttcaaccaatgatgcggtgaagtttacaccatcgccttgaggcgatagatccattccagcgcctgccgtggcgacagtgaatctgcgtctagcgcttcaagggcttcaaccgccggtgaaatctcttcgctcagcagcggcaactgtgggccatcaaccttgctggcggcggcgttattcgacagtgcttccagctctttgagtttctgtctggcgcgcttaataacctcgcgcggcacaccggccagcgcagcaaccgccagtccataactcttgctcgccgccccttcctgaacgctgtgcataaaggcaatggtatcgccgtgctcaatcgcgtcgagatggatattcaccgtgccttccattttctccggcagcgtcgtcagctcaaagtagtgggtggcgaacagcgtcatagccttgatgcggctcgccaggctttcagcgcaggcccaggccagcgacagaccgtcataggtggaggtgccacggccaatttcgtccatcaacaccaggctgttctcggtggcgttgtgcagaatattggcggtctcagtcatttcaaccatgaaggttgaacggccggaggccaggtcatctgcggcaccgacgcgggtgaagatgcggtcgataggccccagcgtggcctgctcggcgggtacgtagctaccgatgtgcgccatcagcgcaatcagtgcggcttgacgcatataggtactcttaccgcccatgttgggaccggtaataatcagcattctgcgctgtggagacatgaccagcggattagaaataaagggttcgctcagcacctgttccaccaccggatgacgaccaccgacaatgttgatgcccggcttttcgctcagcgttgggcagcaatagttgagcgtgtaagcgcgctcagccagattattcagtacgtcgatttcagccagcgccgcggcgctctgctggagcgcagaaaggtgcggcatcagcagttcaaacagctcttcgtacagcgctttctccagcgacagcgctttgccttttgaagtcaggaccttgtcttcatactctttcagttcgggaatgatgtagcgttcggcattttttagcgtctggcggcgaacataatggataggtgcaaggtggctctgactacggcttatctgtatgtagtaaccgtgcacgccgttgaagcccactttcagggtatccagacccagcttttcgcgttcgcggatctcgaggcggtcgaggtaatccgttgctccgtcggccagcgctcgccattcgtcgagttcggcattgtatcccggcgcaatcacgccaccgtcgcgcaccagcacgggcggtgcgtcaataatggcgcgctcgagcagggcgatcagctcatcaaattcgccggccttttcaaccagcgattgaacgtaagggacgtcgattggctgaagcagagcgcggatctccggcaactgctggagtgcgtggcgcatacgtgccaggtcgcgcggacgcgcgcttcgcagcgccagacgtgccagaatacgttcgaggtcgccgacctgacgcagtaccggttgcagctcggcggtcaagtcctgcaaagcaccgaccgcctgctggcgattgttcagtaccttgaaatcgcgcgttggcatgtggatccaacgcttgagcatgcggctgcccatcggcgtgacgctttggtcgagaatggcagccagcgtgttttcaacgccgccggaaaggttttgcgtcagctcaagattgcgtctggtggcggcatccataatgatgccgtcctgctgacgctccatggtcacgccacgaatatgcggcagcgaggtgcgctgggtgtctttcacgtactgcaataggcagccggctgcacgcagcgcctgcgtagcctgttcgacgccaaaaccgctgaggtcacgggtgccgaactgaagattaagttgctggcgcgcggtgtcgagctcgaactcccagattgggcgacgacgcaggccacggcgggtgtcgattaacgacatcgactcgaaggtttccggatagagcaattctgccgggttcgtgcgctggatttcggcggccatcgtttcgaggtcggtcggttgagcaacgcggaaacgtcctgagctgatatcgagcgttgcgtagccgaagcctcgaccgtcttgccagatggcggccaacaggttgtcctgacgttcgcttagcagcgcttcgtcactgacggttcctggcgtgacaatgcgcaccactttacgctcgacagggcctttacttaaggccggatcgccaacctgttcacagatggcaacggattcgccgagatgcactagcttggcaagatagccttcaaccgcgtgataaggaacgcccgccatcgggatgggttcaccggcggaggcgccgcgcttggtcagcgagatgtccagcagctgcgaggcctttttggcgtcgtcatagaacaactcatagaagtcgcccatccggtagaacatcaggatttcaggattctgtgcctttagacgcaggtactgctgcatcatgggggtgtgggcatctaaattatcgctattactcatgcgcttagtttcttagttgtttaagtcattcatagagttaaaaaggctctataactctaaaattttgtgcgggtatagtagcccaagcacgtcaaaactgacaccccgcaaacgggaatgcatctcggagatttgcaaagaagtgtgggcgcttgttgtcggccagagctgctgctagatctggcggtcgcgtatttcatgcaccatttcgatcagcgcctttaatcccgctggaacgtgtctgcgaccgggataatacagccgtaatccttcaaacgaagggcaccactcttccagcacgctgaccagactgccgctggccagatccttttcgataaaccagcttgaaatgaacgccagacccatgccgctgcgtgccgcctggcggatagcgcgtaactcgttgagcacgattcgcgtcggtatgtttatcgcaaatttttgctgatgacgctcaagctcccagtggtagattccgccgtgagacatacgcatgccgaccccttgatgcgcggcgaggtcctccggcgtttgcggcacgccgtgggtggcgaaatactgcggacttccgacgatgagcatgcgtgccgggggcgtcactggcacggctatcatgtcctgcggtaccgattcaccgagtcggatccccgcgtcaaagccctcggcaacgatatcgatcatccgggcctcggtcgcgatatctatgcgcatgttggggtaacgctgaagatattcccgcagcagcggctcaaacagcagcagtgcagattcgggcggagcattaatacgcagggtgccggtgggtgactcgggctgtgtgcttatctcttccgaagcacgctgaatctcggccagtgcggggcaatgcgttcgacataacgtcggcccgcctcggtaagcgatacgctgcgcgttgagcggttaaagagtctaatattgaggcgagcctcaaggccggcaacggcattgctgaccgcggtagcagacatgcctagctcgcgcgcggcggcgcggaagctgctgcgttgcgcgacggcaagagtcacttcaagctcagtcagaccagtacgatgcatcgtttattgtcctgattttcgttataccccgtacagcataaccccgcttatcagagcaacctagccttcttatactcctcaatattgaaaacttattaacgagtgcgtttgaggatccatcatgcaaaagatcgacaaaatctatatcaacggtgagtttctgacacctcacggcaccgaacgtttcgagctgtttaatccggctactgaagaggtgattggcacggtacaactggccgacgtagaggatactcagcgggcgatagcggcagcgaaagcggcgttcccggagtggtcgcgcacgactaaagtgcagcgtattgccgcactcaaacgcatgcatgccgccgtggtggcctgtgaagaggaactgttggaggccattatcaccgagtacggcgcgccagccgcgcgttcacgctggatggcgagctatccggcagacgtcattttacaggttatgcagacgctcgagtcctttgaattcgaagagcaggctggtatcgcgaaggtcatcctttgcccggtcggcgtcgctggcctgattacaccctggaacagcgatgcagggtttatctgcaacaagttggcgaccgcgctggcggcgggatgtaccgccgttatcaagccgagcgagatgagcgctattcagacacaaatcatcaccgaggcgttgcataaagccgaactgcccgcgggcgtattcaacattgtcaccgggcgtggcgaggtcgttggcgcggagataagccgtcaccctgatatcgccaagatttcttttaccggctcgacggcggtgggcaaggggattatcgaaagcggtgcagcgacgctcaagcgcgtgacgctggagctgggaggtaaatcacccaccattattctggacgacgccgacgctgcaaccgtggtgccgatggcgttgatggcggggtttatgaacagcggacaggcttgtattgccggaacgcgtattctggtgccgcgcagtcgtttaacggagttcgagcaggccttctcccgcgccgtggaacagattcagtccggctctccgcgtgatgagaagaccgacattgggcccatggtcagtcgcaaacagtgggaacgcgtgcagagctatattcgccttgggctagaggaaggagcaacgcttttgaccggtggggaaggacgtcctgctgggttcgataagggctggttagtgaaaccgacggtattcacacaggtcaataatcagatgcgaattgcccgtgaagaaatttttggacccgtgctgtcgattatcccttatgagactgaggccgatgcgctgaaaattgccaacgatacagattatggcctcaatgcgatggtgctgagcggcagtcttgagcgaggtctccgtgtggcgcgacagattgaaaccggccgagtgctggttaataccctggctcacgaacctcaggcgccgtttggcggcgttaagcagtctggtttaggccgcgagatgggcaagtgggggttgatggcctatctggagcctaaaacgctgttggtgggatagcacgggggtatttttaaagaggataaaaagctaaaatgtacccagacaaagactaaggtcttttatttttctgtattttcatttctttattagcttttttaagaggttagcgtgcaatcattaccacattgtcctaaatgcagttctgaatttacctggcaggaaggcgaacagctgaactgtccggaatgcggtcacgagtggccggccaatgcggcagcagcagaagaagagggacgggtggtaagagacgctaacggcaatcttctggcagacggcgatgcggtcacggtcatcaaagacctcaaggtcaaaggcagttcatcgacccttaaaatcggtaccaaagtgaagagtatccgactggttgagggcgaccacaacatcgactgtaagattgacggttttggccaaatgaagctgaaatccgagtttgttaagaaaaactaaaatacctgcctaggatcctccgccagcacctggttttaaccccgtctggcggagtgtttatctgttgtttgtttaatttccctttaacattcctgtttgttcgttgcaaacaatgcattaacatgacgatctacttttttgtatcgccatacggatatctgatgcgctacctggctacccttcttcccatggttgttctgctctcagcctgtagcagtacgccgaaaaataccccttctgctcaaggtactgcaccgagcggtggattcctgctatctcctgcgcagaacggccttttgcctaacggggattttgccgataatgccgcggccaatgcgtttatcgacaaaatggtgcgcgagcacgggtttgaccgtcaacagctgcaggatactctcgggcaggcgaagcggctggactgggttctgcggctgatggatcgccaggcgcctatcggtccggctccgacggggccttacggcgcgtggatccgctatcgtagcaagttcattacgcctgataatgtgcagaacggcgtggccttctgggaccagtatcaggatgcgctgcagcgtgcctaccagcagtatggtgtaccgcctgaaattatcgtcggtattatcggcgtagagacgcgctggggtagggtgatgggtaaaacgcgtatcattgatgccctcgcgacgctggcgtttgactatcctcgccgcggtgcatactttgccagtgagctggaaaccttcctgctgatgtcccgcgcggaaggtgacgatccgctggcgctacgtggatccttcgccggtgcgatgggttacggccagtttatgccttctgcattcaagcaattcgccgttgacttcgatggcgatggtcacgtgaacctatgggacccgattgacgctatcggcagcgtagccaactactttaaatcaaacggttgggtgccgggtgagccggttgcggtgcaggcgagcggtcaggctgccgggctggaaaacggctatcagaccaaatattccgtctcgacgctggcctcggtgggcctcacgccaatgggatccctcggcggttatcagcaggcgagcctgctgcgtctggatatgggcacctactatcagtactggtatggtctgcctaacttctatgctattacccgttataaccacagcacgcagtacgcgatggccgtgtggcaactgggtctggcggtgaagcaggcgcgcatgggtaactaatatcccaaccctcaattccggcagcagcggtcgttgctgccgttattctcccttactctctccaattttcacccgtctgcgcgcgctcccataaacagtgcctgccaatgaaagccatttttacgtctcgggagacttcccgtactttgttactctgcataactcttgggctgagagaagtgctaacattgtctgacttaaacttttcttgttgcgggacaagctatgaccgaaaagcatttgcagcagctcagcattgatgtcggggcggcgctgaaagcggccggcctgtgggtaacctgtgccgaatcttgcaccggtggctgggtggcgaaagccattaccgatgtcgcaggcagctccgcctggtttgaccgtggattcgtcacatacagtaacgccgccaagcgtgaattgctggacgtctccgattctacgctcaaagaatttggtgcggtcagtgaacaggtcgtgcgggaaatggcccgtggtgcaaggtatgcggcgggggcggacgttgcggtatcgattagcggaattgccggtcctgatggcggcagtgaggctaaaccagtgggcaccgtatggtttggatttgccgacaaagatggtcggatttatgcatgcaaacaggttttttccggagatcgcgaagccgtacgtttgcaagctgctgttttctcgctacaaaccttactcgacgagtttttgaaaaaataggcttgatactgtatgagcatacagtataattacagctaattacctgcatgtgaactttgcatccaaacaacaacattcagtgacaacgacgtgtagtttcgcacggctcgtcacccgaaggagtaaaaatggctattgatgagaacaagcaaaaggcgttagctgcggcactgggccagattgaaaagcaattcggtaaaggctccatcatgcgtcttggtgaagatcgctctatggatgttgaaacgatctccaccggctctctgtctctggatatcgcgttgggcgcaggtggcttgccaatgggccgtatcgtagagatctacggaccagaatcttcaggtaaaacgaccctgactctgcaggttatcgctgccgctcagcgcgaaggtaaaacctgtgcatttatcgatgctgaacacgcgcttgacccaatctatgccaagaaattgggcgtagatatcgacaatctgctgtgttctcagccggacaccggtgagcaggcgcttgaaatctgtgacgcactgacccgctctggtgcggttgacgttatcatcgttgactccgtggctgcactgacaccaaaagcagaaatcgaaggtgaaatcggtgactctcacatgggcctcgcggcacgtatgatgagccaggcgatgcgtaaactggccggtaacctgaaaaatgccaacacgctgcttatcttcattaaccaaatccgcatgaaaattggtgtgatgttcggtaacccggaaaccactaccggtggtaacgcactgaagttctatgcttctgtacgtcttgatatccgtcgtattggcgcaatcaaagacggcgacgtcgttgtcggtagcgaaacgcgcgttaaagttgttaagaacaagattgctgcgccgttcaaacaggctgaattccagatcatgtatggtgaaggcatcaacatcaacggcgagctggtcgacctgggcgttaagcacaagctgatcgagaaagccggtgcatggtacagctacaacggcgagaaaatcggtcaaggcaaatctaatgccagcaatttcctgaaagagaatccgaaaattgcttccgaaatcgacaaaaaactcagagaaatgctgctgagcggtaccggtgaactgagcgttgcatcgactgccgaaggactggacgacaacgttgaaaccagcgaagagttttaattctccgttctgagtatggctttcgcatcaagggccgtacttaagaaattgtcgccttaaaaaacagcctgcaacccaggctgtttttttgctttttaaggagcgaaaaatgactcaggacataaatgaggacgccgagttttcatcactgttttccaccacgcaggacgataatgccaaaaagcttaataacctgattgccagagcgatgcgcctgctgggccagcgtgaccacggtgaggccgagcttcgtcgtaaactgctgacgccgccccagccctttactcgtccttcctcttacaaaaaccgcaaaaatcaacaatccagtagcccgaccgtcgcaaccgctgctaaagaaaaagaggttgaggagatttgtcccgagcaggtcgagcaggttattgcatactgttatgagcacggctggctagacgacgccagattcgccgaccgctacattgcgggtcgcagtcgcaggggattgggcgcacagcgtattcgctccgaactgatgcaaaagggggtagataaagaggtgattaacctggcgctggaaaattgcgaggtcgattggtgcactcaggcgtatgagctggcgacgcgtaaatttgggcagccattgcctgtcgattggaaagaaaagtcgaaagttttacgttatttgctctaccgaggtttttttcaggaagaaattcagtctatttatcgcgattttgaagattgaacgcatacgggattttacttcccagcgaagaaattttatcttatccccactttttgttcgtgagcgacaaagtaagctggacgttatcacgctaatcttgctcacgggccgacctttttagccttattccgggacatttatgagcaagagcaccgctgagatccgtcaagcgtttctcgatttcttccatagtaagggacacactgttgtcgacagcagctcgctgatccctactaatgatccgaccttgatgtttaccaatgccggtatgaaccagtttaaagacgtttttctgggcctggataaccgcgattacaatcgcgcgaccacgtctcagcgttgcgtacgcgccggtggtaagcacaacgatttagaaaacgtgggttacaccgctcgtcaccacaccttcttcgagatgctgggcaacttcagctttggtgattacttcaaagaagacgccatcaagtttgcctgggagctgttgactggggagacctggttcaacctgccaaaagaaaagctgtgggtgaccgtctacgctaccgatgatgaagcttacgacatctgggaaaagcagataggcgtacctaaagaacgcatcatccgtatcggtgataacaaaggtgcccagtatgcgtcagataacttctggcagatgggtgacaccggtccttgcggcccttgctccgagatcttcttcgaccacggcgaccacatctggggcggccctccgggtagcgcagaagaagacggcgaccgttacatcgagatctggaacctggtcttcatgcagttcaaccgccaggctgatggcaccatgctgccgctgcctaaaccttcggttgataccggtatgggtctggagcgtatttcagcggtgctgcaacacgttaactccaactatgacatcgacctgttccagacgctgatcgcggctgtggcaagcgtcactggcgctaccgacctcaacaacaagtcgctgcgcgttattgccgaccacattcgttcttgcgccttcctgatttccgatggtgttattccttctaacgaaggtcgtggctacgtgctgcgtcgtatcattcgtcgtgcggttcgtcatggcaacatgctgggcgcgaaggaaaccttcttctataagctggttgcccccctgattcaggtgatgggttctgcggccgttgaactggcaaaacagcagtcaaccgttgagcagttgctgaaaaccgaagaagagcagttcgcacgtactctggagcgcggtctggcgctgctggacgaagagctggctgcactgaaaggcgatacccttccaggcgaaattgttttccgtctttatgacaccttcggcttccctgtcgatttgaccgctgacgtttgtcgcgaacgtaatctgaaggttgacgaagaaggcttcgagaaggcgatggaagttcagcgcaaccgtgcgcgtgagtccagcggtttcagcgcagactacaacagcatgatccgtgttgaaggcgtgacgcagttctctggctacgagcacgtacagcgtcaatctaaagtggtggcgctattcgttaacggccaacaggttgacgagatccaggcgggcgaaagcgccatcgtggttctggatgacacgccattctatggcgaatccggtggtcaagttggcgataagggcgttctgaaagcctctggggcgaattcgcggtaagcgatactcagaagtacggcaaagcgattggccatcagggcgtgttgagcgcaggtaaacttgccgttggcgacagcgtcgaagcagacgttgatgcaacccgccgtgaccgcattcgtctaaaccactctgcaacccatttgctgcacgcagcattgcgtcaggttctgggcaagcacgtggcgcagaaaggctctctggtcaacgataactacctgcgtttcgacttctcgcatttcgaagcgatgaagccagaagagatccgccaggtagaagatttggtaaatgcgcaaattcgtcgtaatctgcctattgagaccaacatcatggcgctcgacgacgcgaaagagcagggcgcaatggcgctgttcggtgagaaatatgaagatcacgtgcgcgtactgcgtatgggtgacttctctactgagctctgcggagggatccacgccagccgcaccggtgatattggtctgttccgtattcaaagcgaatcaggcacggcagcgggtgtccgtcgtattgaagcgattactggcgaaaacgcgattaatgcgcttcatcagcagagcgacctgttgcaggacgtggctcatctggtgaaaggtgacgtgaacagcgtgaccgacaagattcgtaccctgattgagcgttcacgcctgctggaaaaagagcttcagcaagtgaaagatcaacaggctgcgcaggaaagtgcttcactgtctggccaaacgaaagacgttaaaggcgttaaactgctggtaaaacagctggataacgttgaaccaaaaatgttgcgtactatggtcgatgacctcaaaaaccagttgggttcagttattatcgtgttggctaccgtagcggacgataaggtgagtctcattgcgggcgtaacaaaagacctgaccgatcgtgtcaaagccggtgaactcatcggtacgatcgcagcccaggtcggcgggaaaggcggcggtcgtcctgatatggctcaggcgggcggtaccgatgtacaagctttgccagcagcgcttgcgggcgttgaagcttgggtttccgacaagctttagtcatacaatcagtaactgcgagaacgccataattaactgtgtattatggcgtttttagtcttaacgaccggttgattctcactatttaagccacgactgcgctgatttcagctaaacttaaattaactcgtagctaaggtacaaagctgacgaccatttaatgtggaggtcatggcttacgttttcacagcatatgatagataatgcctgtgatgctgagagacccgactcttttaatttttcaaggagcaaagaatgcttattctaactcgccgagttggtgaaaccctcatgattggcgatgaggttacggttaccgttttaggtgttaaaggtaatcaggtacgtattggtgtgaatgcgccgaaagaggtctctgttcaccgtgaagagatctaccagcgtatccaggctgaaaaatctcaacagacgagttattaatttatcaggcgtctcgtcgatggcgaggcgctgatgcctttttagcgccgttttcagcgttaccccttccgttttctcgcttttcctttacaaaacttctcccactatcaagacttcctgaatctctttttactgattaaacattggtttttaccaatcaaaggccatattttgccggtaatctgcgcaggttggatgcgaattgtgcaaacaaacgattcttcggaaaaaagggtttgacttataagtgcgggaaagtaatatgtgcgccacgcagtgccgatgagcttaaacaaagtaagtcagcacaattcgaaagaagcgtatggtgaggtggccgagaggctgaaggcgctcccctgctaagggagtatgcggtcaaaagctgcatccggggttcgaatccccgcctcaccgccatttaagatgcacccatagctcagctggatagagtactcggctacgaaccgagcggtcggaagttcgaatcttcctgggtgcaccattctttctttgatgtatattgatttgcaatcaagtgagcatcagaggccgataaggtagaatgtgaaagtggtgaagtaactctgctgtaaagaactgcattaaagaattgttatgcacccatagctcagctggatagagtactcggctacgaaccgagcggtcggaagttcgaatcttcctgggtgcaccattcttaatccttcgctttagcatcagtaaaaaacttaagtactacccctgcacccatagctcagctggatagagtactcggctacgaaccgagcggtcggaagttcgaatcttcctgggtgcaccatattctttaagcgttgagattgtgtgatgacagaatctcaacgtaataaaaaacccgcttaggcgggttttttgctttctgcgcttcacgaagatatcttctcgcaatcctctctgtttttgtcctacgccctatgtgctgtccagcctgacaaaaagcgacaatttcctatctttacgctaaagtagtttccccatatttgttaacagcaggcggtgtttatggattacaagctgtacgagggatacgaaggattgatatttgatatggacggtaccatattggacacagagccgacgcatcgtaaagcctggagccaggtattatcgaaatacaacctgcagttcaacgtagctgatatggctgctttaaacggttcgcccacctggcgaattgcaaagcatataattgatagtaacggcgtggagctcgatccccaccacctcgccgctgagaaaacctcagccgtgcaggagatgttgcttgatacagttcagccattaccgctgattgaggtggtaaaggcgtttcacgggcgtcgccctatggcggtcggcaccggcagcgaatactggatggcggacgcactgctgcgtcatctggggctacgtgagtgcttcgacgcggtcgtcggcgccaacgatgtagaaaatcacaagccagcacccgacaccttcctgcgttgcgcagagctgatcggtgtgccgccagagaagtgtgtggtgtttgaagacgccgatttcggtatcgaagcagccaagagggccaatatggcctacgtcgacgtacggacgctctagaggcgttttggcaggctgggctacgcatgttctgaagtgaacacctaaggtgcactcagggcgaggttaggttggtatcggttatcaatgatggtcacatctatgcagattcagaaaacttacgagttaacttttccaaacagcgggaggtcaatttgatcccggacgtatcaaaggcgctttcctggttggaagcccatccccaagcagtaaaaggtatttgtcggggattgagcgcgagaccttgcgcgttaacccaaatggcgcgctggcaacgacgggtcaccctgaatctttaggttcggcattgacgcataatttgatcactaccgattttgccgaggctcttctagaatttattaccccggttgatgacagtgttgaacatactttgcaggtgctgcgtgatattcatcgccatgttgcaagagaactgggcgacgaaagaatgtggccgttcagcatgccttgcttcattgattcggccgcagacatcgagctggcgcagtacggcacgtcgaacatcggcaagctgaaaaccctgtatcgtcaggggctgaaaagccgctacggtgcgctgatgcagactatttccggtattcactacaacttctctctgcctctcgaattctggcaaacgcgtctgggcatcagcgatgccgagagtggtaaggacgctatctccgccggttatttgaatgtcattcgcaactattaccgtttcggctgggttatcccttatctgtttggggcgtcgccggcaatttgctcttccttcatcaagggccgagaaacgaacttgccgtttgagtacaccgaaaacgggctgtgctatcttccttatgccacttcactgcgcttaagtgacttgggatacaccagtaaatctcaaagtaatctgggcattacctttaatgacctcgagacttacatcgccggtgttaaacgcgcaacccgcactccgtgggatgaatacgcggcaattggcctgaaaaaagagggaaaatatctccagttaaacaccaatgtgttacagattgagaacgagctttatgctcctatccgtcctaagcgtgtcactaaatcaggcgaaactccttcagatgcactgcggcgtagtgggatccaatacgttgaggtgcgatccctcgacattaacccattcaccccgatcggtattgatgcctctcaggcacgtttcctcgatctatttttgatatggtgtgcattagccgatgcgccggaaatgaacagcgatgagattcgctgtacgcgtcaaaactggaatcgcgtaattctggaaggacgcaagccggggcagacgattggtattggttgtgatgatgtcaggcagccgttagataaagtcggtaaatcactgttcgccgatctggcgcgcgttgccgaagtgctggatagccagaatggaaatcgcgagtatcaagacgtgtgccgtgaactggttgccgccttcgataatccggaactgacctattctgcacgtatcctgaaagagatgaaggccgaagggcagggtaatctcggcgtgaagtgggcggataaatatcgtcagatgctgcttgatgagcctcttgaggtgttgagcgagcaggagctggcgcaagagagcgaggcttccaggctgcgtcagcgcgaccttgaagcgaatgataagctaagctttgaagagtacctggcgacacttgctggaaactgaggcaggaagccacaaaagaaaaaggccacaatcaatgtggccaaaacaaacatctctgtttacagggatgatgataacaaatgcgcgtctttcatatattcagactcgtgatatgggaaaaggtttcctgagttcgataaaaaaataaatttttttaggagaggtgacgatatgccactgttggatagctttacggtagaccatacacgaatggcagcccctgctgttcgcgtcgctaagaccatgaaaaccccaagtggggacaccattaccgtattcgatctgcgtttctgccgcccgaatattgaagtgatgaccgaacgtggtacccatactctggagcacctgttcgctggttttatgcgtaaccacctgaatggtaacggcgtcgaaattatcgatatttctccgatgggttgccgcacaggtttctacatgagcctgattgggttaccggatgaaaagcgggttgctgactcatggaaagcggcaatggccgatatcctgaaggttaaagatcagaaccagatccctgagctgaacatttatcagtgcggtacctgcaacatgcactcgctgaaagaagcacaggaaatcgctcagcacatcgttgatagcgaaatcggtatcaaccacaacgacgaactggcgctgccaccagagaagctgaccgaactgcacatctagtcgttcagcattgaatcgctgcattcctgcggtttaaaagcataaaaaaagacgcgatattgatcgcgtcttttttattacccgcagaataggatccgcgaaggaattagtgttcggtgctgctgcgcagcgtcttcaacggtcggaccttgacctgtttgatcatgttgtcctgtacgtcgaggatctcgacctcatagctctcgatacgcaggctggttccggcttttggaatatcttccagcacctcgagcagcatcccgttgatggtacgcggcccttcggttggaagattccagttgaaggccttgttcagctcacgtacgttggcgctaccttcaatcagcacggtgccgtcactctgcggggtcacttcttctgcaagcgttggcgacatcgaggtcgtgaagtcacccactatctcttcgaggatatcctcaaccgtgaccagcccctgaatatcgccatactcatcgaccacgatgccgactttcttcttgttgcgctggaacttgaccagctgaatattcagcggggtgccttccgggatgtagtaaatctcgtcggcggcgcgcagcaggttctctttgttgaactcacgcttttcggtcatcagtcgataggcttcgcgtagtcgcagcatgccgattgagtcgtcgagagagtcgcggtaaagcacgatacgaccgtgcggcgagtgggtcagctggcgaataattgacttccagtcatcgttgatatcaatgccgacgatttcgttacgcggcaccattatgtcatcgaccgagaccttttccaggtccagcaccgacagcagcatgtcctgattgcggcgggaaatctgtgagcgtgactcgttcacgatggtgcgtaactcttccttgctgactgcatcgctaatgccaacgttggttttgataccaaacatgcgcatcagaaccttcgagagactgttgagcagccagaccagcggcagcatgatggtctgaagcggacgcagcagcaggctgcttgggaaggcgacgcgctccgggtgaagcgccgcataggtctttggcaggacttcagcgaacagcagtaccacgaaggtcagcacaccggtggcaatcgccacaccggcatcgccgtagaggcgcatacccacgatagtcgccagcgcagaggccagaatattgaccaggttgttgccaatcagtaccaggctgatgagctgatcgggacgcttgagaagtttctccacgcggcgcgcggcgcggttgccctgcttggaaagatggcgtaaacggtagcgattgagggtcatcattccggtttcggaagccgaaaaatagccggaaactaccaccatgacaaccaggatgataatgagggtagttgtagagacgtgctccaacggtaattccttatttatttatagattaatagttacgaataacgattaatggaccgtgagctgctgaataaggcggctgccgaaataggcaagcgtcagcaaaatggcacctgccatgctaaaccataccacgcgacggccacgccagccttcgtgatagtgtccccacagcagaacgatgtaaaccagccaggccagaatagacagcaccgctttgtcgatgttttcgcggctgaagagattctccatatataacaggcctgtgcaaagcgtcagggtcagcaggattaccccgccctgtgtgatatggaacagtttgcgctcgatgctcatcagcggcggcatgtcggctgagaaactcagtttcttgttcttgagctggtaatcgagccacgccagttgcagcgcataaagcgcggcgataatcagcgttgcgtaagagaaaagcgctaatccgatgtgcaccagcaggcctttgctggcctcaaggtgagtgataaattcgcctggcaggaaagcaaccagggccagattgattaacgcaaagcagtagacaatcggcaaaataaaccacccgcggctgcgcgaggcggccacggtcatgacggtgcaaatgatcaggctgacgatagagccgatattgaccagactcaggttttgcccagtgctgacgtcaaatacccgctgttcgagcgtaatggcgtgacaaatcagggcaacgaaagccgaaagtaacgctatgcgccgataggtgccattcttgcggatcaggctgggaatgatcagtgaaaggcttaacaaataggcgatcatggcgacaagagctaaagctggcatattgtgtcatttgcgtcgaaaaatgaatgagaaagccagtatagcgtccccggcgtcgtgctccaacaaccttcctgtttttacctttatatatcgggcagagattgtgcggacttctcgtgttataatcccgcaattgtgtcgcaaaggcggcctgtcattacgttgagcaagagacgatgtttgataatttaaccgatcgattgtcgcgcacactgcgcaatatcagcggccgtgggcggctgaccgaagaaaatgttaaagaaaccctgcgtgaagtgcgtatggcattgctggaggcagacgttgctttaccggtagtgcgtgacttcatcaaccgtgtgaaagaagcggccgttggcaccgaagtcaataaaagcctgacaccggggcaggagtttataaagatcgtccagaaagagctggaaacagcaatgggcgaagcgaactccgagctgaatcttgccgcgcagccaccggctgtggtgctgatggccggtctgcagggtgcgggtaaaacgaccagcgtcgctaagctcgcaaaattcctgaaagaaaagcgcaagaaaaaagtgctggtcgtttctgccgacgtttatcgccctgcggcgatcaaacagcttgaaacgctggccgagcaggttggggttgagttcttctcctccgacgtcagccagaaacctatcgacatcgttaatgctgcacttcagcatgccaagctgaagttctttgacgtgttgctggtggataccgccggtcgtttgcacgttgacgaagcgatgatggacgaaatcaaacaggtccatgcggccatcaagccggtggaaaccctgttcgtggtcgatgccatgaccggtcaggatgccgccaataccgcaaaagccttcaacgaagcgctgccattgaccggtgttatcctgaccaaggtagacggtgatgcgcgcggtggtgcggcgctgtctattcgtcacatcacaggcaaaccgattaaattcctgggtatgggtgaaaaaaccgatgccctcgagcctttccatccggaccgcgtggcttcacgtattctgggaatgggcgacgtgctttccctgatcgaagatatcgaaagcaaggtagaccgtgcccaggccgagaagctggccaacaagatgaaaaagggcgacggtttcgacctcaccgatttcctcgaccagctgaagcagatgcgtaacatgggtggcatggccagcatgatgagcaagctgccgggcgtgggtcaactgcctgacaacgtcaagtcgcaaatggacgacaaagtgctggtgcgcatggaagccatcattaactcgatgactattaaagagcgcgccaagccagagattatcaagggttcccgcaagcgccgtatcgcgctgggtgccggtatgcaggtgcaagacgttaaccgactgctcaagcagttcgacgacatgcagcgcatgatgaagaaaatgaagaacggtggcatggctaaaatgctgcgtggcatgaaaggtatgatgccacccggtttccctggccgataagacgctgttcaacatgataataagtaccgctaattagctgctggccaaaagtagtttgaggttatcgacgctttcgattgctttttgcgccaaaatgagtaaaattttcgggctttttatatagcaaccagaccccgttccccgatggggtctggttgttttattcactaaagaggatgttatggtaacaattcgtttggcacgtggcggcgcaaaaaagcgtccgttctatcaagtagtagtgaccgacagccgcaatgctcgtgatggtcgcttcatcgagcgcgtaggcttcttcaacccattggcttctggccaggctgaagcactgcgtctggacctggatcgtattgctcattggcaagatctgggtgcaaccgtttctgatcgcgtagcttcgctgatcaaagacgctaagaaagcagcttaatctgtcgcggtggtggcaatgagcaagcaactcaatccagtggcgcccgaagaaccgattgttctcggtaaaatgggctcaacttacggtattcgcggttggctcagagtgttttcatccaccgaagacgccgaaagcattttcgaataccagccgtggtttatccagcaggcaggtaagtggcaagcggtagagctggaaagctggaagcgccacaatcaggacctgatcatcaaagtcaaaggcgttgacgatcgggatgcggctaacctattgaccaatcgcgagattgtcgtagattcaagccagctgccagacctcggcgagggtgattattactggaaagaccttttcggttgccaagtagtaacatccaccggttacgaactgggtaaaatcatcgatatgatggaaaccggttctaacgatgtcatggtagttaaagcaaacctgaaagatgcatttggcatcaaggaacggttgattccgttcctcgatgggcaggttatcaagaaagtcgatctcactactcgcatcattgaagtagattgggatcctggtttttgacctccgtaatgtctacttgcgtagaaacgaaggctgagtggaatgtcgttatgaggattaggctatgtggattggtatagttagccttttccctgagatgtttcgcgcaatcaccgattacggagtgactggccgggcagttaagaatggcctgctgagcgtagagtgctggagtcctcgtgacttcgcctacgatcggcatcgcaccgtggacgaacgcccttacggcggcggcccgggaatgctgatgatggtgcaacctttacgggaagcgattcatacagctaaagcagcggcaggcgaaggcgttaaggtgatttatctttcaccacagggtcgcaaacttgatcagcaaggcgtttgcgaactggcggctcaccagaaacttgttctggtatgtggtcgctatgaagggatcgatgagcgcgtaatcaaaaccgaaattgatgaagaatggtcaatcggtgattatgttcttagcggtggggagctcccagctatgacgttgattgattcagtatcccgctttataccgggtgtgctgggtcatcatgcttcggcagaagaagattcttttgccgatggattactggactgtcctcattatacccgcccggaagtgttggaaggcatggaagtaccgccggttttactgtcgggaaatcatgcagaaatacgtcgctggcgtttgaagcagtcgctgggtcgtacctggcttagaagacctgaacttctggaaaacctagctctgactgacgagcaagaggtgttgctgaaagagttccaacgggaacatcgaatcagtcaacaagactaataagggtatgtttgagcaatagctccaggcatttcccgaactatcagtttacctagggtaagagatatattatgagcaatatcattaagcaaatcgaacaagagcagctgaagcaagacgtaccttcattccgtccaggtgactcggtcgaagtgaaagtatgggttgttgaaggaagcaagaagcgtctgcaggcattcgagggcgtggttatcgctatccgtaaccgcggtctgcactctgcattcactgttcgtaaaatttctaacggcgaaggtgttgagcgtgtgttccagactcactcacctgttattgacagcatcactgttaaacgtcgtggtgaagttcgtcaagcgaaactgtactacctgcgtgagcgtaccggtaaatcagcgcgtatcaaagagcgtcttaaccgcgttaacgcacgataacattctcaagtgttatataaacggcccgcttagcgggccgttttttttcgtctcaagaaaagtaaaaagtgaataaatcagcggaagatttgtgccgcataaacatgttttgtaattttaagtttacacatagcgtgaaatgttgagggttttagcctgtttttaaaggcgtaattgattgtttaattgctgtattagatggtttttatgcaagtttttgatgtctgtaaactggcggggggttgcagtgtgattggtaattttaagtttacactctgggtttgaaaagtttacagcctgtgttatcgttgtccgcagtgctgatacacagcaaaaaattcaaaatttatcgcgagtaaccatcatgcaaaaagacgccttgaacaacgtgcacatcagtgcggaacagattctgattacgcctgaagagctgaaaaacaaattccctctgagcgtagaaaatcaaaccagtatcgagcagtcgcgtcagacgatcgcagatatcatccacggccgcgatccgcgcctgctcattgtctgtggtccatgctctgttcacgacctcgatgccgcaatagattacgcgcgtcacttgaaaaccctgtccgaagagctgagcgatcgtctgtacatcgtgatgcgtgtctactttgaaaagccgcgtactaccgtgggctggaaagggcttatcaacgacccacacatggacggtaccttcgatgttgaagcaggtttgcacatcgcgcgtaatctattgctgcaactggtcactatgggtctgccaatcgcgaccgaagcgttagacccgaacagtccgcaataccttggcgacctgttcagctggtctgctatcggcgcacgtaccaccgaatcgcagactcaccgcgagatggcctcgggcctgtcgatgccggtgggctttaaaaatgggactgacggtagcctcggcaccgccatcaacgctatgcgtgccgctgcaatgcctcaccgttttgtggggatcaaccaggcggggcaggtttgcctgctgcagactcagggaaatccagacggacacgttattctgcgcggtggcaaaacccccaactatagcgcagaagatgtcatggactgtgaaaaacagatgcagggtgcgggactccgtccttccttgatgatagattgcagccatggcaattcaaataaagactatcgccgccagccgctggttgccgaatcggccattagccagattaaagccggtaaccgttcaattaccggattgatgcttgaaagccatcttaacgaaggcaatcaatcttcagagcagccgcgttcagacatgcgctacggcgtatcggtgactgacgcctgcattaactgggaaaccaccgaggccctgctgcgtaacatgcatcatgaactcggcgacgcgctggcagcacgaatttcaggagaataaacgttttatggtggccgaacttaatgcattacgtgaacagatcgatgaggtcgataaagcgctgttggatcttttagcgagacgtttgcacctggtggcagaagtcggcgaagtgaagagccgttatggcttgccgatttatgtcccgagcgcgaagccgcgatgctggcctcgcgccggcaggaagcggtcaatttgggcgttcccgccgatctgattgaagatgtcctgcgccgcgtgatgcgtgagtcctattccagtgaaaatgataaaggcttcaagacactgcatccgaatctgcgtccggtcgtcattgttggcggtaaaggtcagatgggccgtctatttacccgtatgctggaactgtccggatatcaggtgaaatcgctggagcaggaagactggccacaggccgaatcgatgcttgccgatgcgggcatggttatcgtcagcgtgccgattcatttgaccgaagaggtgattggtcgtctgccgaagctgccggatgactgtattctggttgatctggcttctattaagaataaaccgttgcaggcaatgttggccgcgcatgagggtccagtcgtcgggctccacccgatgtttggtccagacgtggctagcttggctaaacaggttgtggtgtactgcgatggtcgtgagccggaagcctatcaatggctgcttgaacagcttcaggtgtggggcgcacggctgcataaaatcagcgcggtcgaacacgatcagaacatgtcttttgttcaggcgctgcgccatttcgccacctttgcctatgggatgcacctgtcggaagagaacgtagagattgaacaactgctggcgctttcatcgccaatctatcgcctcgagctggcgatggttgggcgtctgtttgcccaggatccgcagctgtacgctgacatcatcatgtcctcagagaataatatcgccttgatcaagcgctactataagcggttcggcgaggcgatggcattgctcgaaagcggtgacaagcaggcgtttattgataagttcagactggtcgaagactggtttggcgattatgcgccgcgtttcctgaaagagagtggctcgctgctgcgacaggcgaacgacatccgtcgctgatagtcgatttcatcgaatagaaaaaaggccagtcggttctccgtactggccttttttactgcagctaagcgcctttttgcgaggcttattccggattaaccgccacaacgttttcacttgggtaacaaccgagtaccttaagtgaacgggtgatcggggttagatttttcagtgcagtttgcatctcttcagagcgcagattggcctgaacatcgacataaaacatctcttcccaagggttaccgttgattgggcgagattccagcttgctcatgataataccctgctcgcggaacaccatcagtgcatcaaccagcgcaccggactgctggccggtcgccataataagcgtcgttttcgctggaacctgttcggtaacgtcgatagcctttcttgccagcacgataaagcgggtaatattttgcttctggttagcgagattgtgttccagaacctgtaaaccatataacgcaccgccagcttcactgccgagtgcagccacgttaggtgacttggaggctgcaactttctccattgcggcggcggtactttcacagtactcgattttccactgtggatagcggctgatgaattggctgcactgctggaacggttgcggatgactgtagaccgtctcgatttttgacatgtctgtttcggccgcaaccagaacgcagtggtcgatgacgttggtcagttcacccacgatagacagactggtgtgttgcagcaggtcataaacgtcattgatagagccggagctggtgttctcgattggcaatactgcgtactcggcctggccagtctcaacctgcgtgaaaatatcctgaaacttgagacacccgcattcgatgaactgatcaaaatggcgagcagcgtattggcgagcggcgaggtgagagtaagaacctttaggacccaggaaggcgatacgcgcggagcctgatgcggtcttgttcaaatgctgctggagcagagcttgctgggtgagtacggagtcttcgatgataagctggtatacccgcgtgatgtaatggccgtcaaggtcatgctttttaccttcgataatcagtcggtttagcagctcacgctcacgctcgatgtcgcggatagggcggtgggtgtgcatcttggtttgggcgacttcaacggctaagccgcgtctctctgccagcagggcaagtaatttaacgtccagtgcgctgatacgctcacgcaggtcaagtaacggggtttcactcatcggttatgcctttttaattgtctgtcctgaagacgggtggcgttcaggaatattctaagccaaaaattcttgagattatcgtcattgaagttgcatcaagcccgcctgtgagcaagttccgttgagctgaagtcgatcggtgattcgtgccaacgagaacaggtaacgccggtgcagctttatatacgacggttattacagttataaataaacaggtataaaaaaagcctccctttgggaggctttctgttcgtcttcgcattctttcttatacgacgaaacgcctcccagtcaggggaaggtaaaaaagaatgcgaagaaaaacggtttgatggtcatagtcgaatagttactcatggtttgtgtgcctttaaggtaacctctggcttttccccctgtcaataacatttgccgtttgcactgctattactctgcggggcgaatattggctaaaacgcaaacgcgcccgaatgggcgcgttggtggtggtcatttaagttctttaaaacccagaccgtgcagtgctggaggggctactcctcgacagtgggctgtaggataatatccttaacgctaccttcggctctgcgagcctcacctttatgttgaaccttgttcaactggcgctcaagtttcgcaatcagctcattcactgctgcatacatatcatcatgtgacgcgcttgctaccagagggccattggcggtgccaattgtggcatctgcgacgaacccgtgcggctccttagaaagaacaatgtgtggattaattaactgagtctgccatttttccagtttttttagacggtcttcgacgtgctcccgaatcgctgtagtgatgtccatttgtttgctggtaatgtttacgatcatattaacttacctctctgtctttccgtcttggtaggtccagcataccgtcctttgagactaaatgtgtgatctgcgtcacactttttcgtcactttttgtcaaggcaggctaaattgtgatttgcgctaattttgtggcgaaagggggttgagtcttagtacgtaataccgcattatcaaagagataaatgggtgggattctagattgattgctcatcttcaaaccaaaaaacaggtaaaaaaaacggcagccgtagccaccgttttaaacacacaggtcgagaaattatcaggcagggttctgcgcgataattttggcaactttgtctgcttcgttattcaattgcagttctttgtaagcattttccatcagcggcagcgcatcacgcgttgcttgagtatccggataatccttcatcatttgctcaacacgattaacaacggcgacgtaagccccgcgtttagtgtagtattgcaccactgatagctcatacttagacaaacgatctttcaggaagaccagacgcttattggcatcggtcgcatactgactgtttggataagaatggatcagctggctgaaatcgcgaaacgcagcgcgtgcatgctgtggatcacggtccgagcggtcgacattaaagaatccttgcagtgcattatcatccaacgccatatcggtcagaccacgcatatacatgacgtagtcgatgtttggatgagtcggattcaaacgcatgaagcgatcgatagacgcctgagcaagcggtaaatccgctgacttgtaataggcataaatcagatccaactgcacttgctgtgagtatggcccaaatggatagcggttatctaacgcttccagttgcgcaatcgcacctttgaagttaccgtcctgcagcttttgctgggcggtcgcataaagcacgtttggcggttatcggggaccacttctttggaactggagcaacctaccagcgccagactcaacgtggctgctgccaccagatatttcacacgcgtcatgacgttttgattatcctcaggtgttattctgggagactgtccgttaagctcccgacaaagaccagctacaatagcacattattttaaacggcatcgccgtgaaaacccaaggttacccaagagcaccatatggcacaacaagtagaactcacggcgacggttgccgaaacacaactcggtcaacgattagatcaggctttggccgaattgttccctgattattcaagatctcgtataaaagattggattcttgatgaaagggttactgttaatggcaaaattgttgccaaaccaaaagacaaagtgttgggtggcgaagttatcgcaatcaatgcacaaattgaagaggaagctcgttggctgcctcaagacattgcgcttgatatcgtttacgaagatagcgatattttagtcattaacaagccgcgtgatctggttgttcatcccggtgccggtaatccagatggtaccgtgcttaatgccttactgcactattatcctgagataattgacgttcctcgctgcgggattgttcaccgtctagacaaagacaccaccggcctgatggttgtggcaaaaaccgtgcctgcgcagacccacctggttgatgcactccaacgtcgcgaaattacccgtgaatatgaagccgttgctatcggcaacatgactgcaggtggcacggtgaacgagccaatttctcgtcacagcaccaagcgtacccatatggcggttcacccgatgggtaaaccggcgactacgcactaccgtattatggagcacttccgcgcgcacacccgtctgcgtctgcgtctggaaaccggccgtacacaccagattcgtgtccacatggcgcacatcaaccatccgctggtcggcgatcagctctatggtggccgcccacgtccgccgaagggcgcgtccgacgagttcatcaatcagctgcgtactttcgaccgtcaggcactgcatgcgactatgctgcgtctgttccatccggttaccggtattcaaatggaatggaatgcaccgctgccacaggacatggttgacctgattagcgcactgaaggctgatactgaagagttcaaggaccagatgcattggtaatgcctgccttaatcctcccacagtggccgcaaccggattcggtgcggtcctgttctaccacacgtcagggcggcgtcagtttgccgccttacgcatcgcttaatctcggttcccacgtttctgattgcccggagcacgttgcgactaatcgccagcggttgattgaacttgcctctttgcccgccgcgccgcactggctcgagcaggtacatggaacggacgtcgcccggttgactcaaacaacccccatcagtcaattcgcgccgatgcggcttataccgaccaacccggcgtggtgtgtgcggcaatgagcgccgattgtttaccggtactattttgcaatcgggcaggggacgaagtcgcggccgcgcatgccggatggcggggctgaacgcgggcgtgctcgaaaatacgctatcggcgtttcgcgccaaacctcaggacatcatggtctggctcggtccggccatcggccctgacaagtttgaagtgggtgcagaagtcagagacgcgtttatcgattcaacgcctaaggctgccggtgcattttcaccgcttgggccaaaatatctcgccaacctctatcaacttgcccgtttgagactccaggcctctggcgttgaacaaattttcggcggagaccgttgcacggtgagcgaaactgattattttttctcttatcgacgcgatggaatcaccggacggctggcaactttgatttggctgagataacctactaaatcaagacgatccaagaacgcatacgctgtactcttaatatagtgacaaagtaaccttgaaaacgtgagggatgacctcatttaatctccagtagcaattttgttctatattggaggtgttatgcgtctggatcgtcttaccagcaaattccagcttgccctcgccgatgcccagtcactcgcactcgggcgcgacaaccaatttatcgaacctatccacctcatgagcgccttgctcacgcaggaagggggaactgtccgtcctttactgacctctgctggcattgatgctcagcgagttcgcacggacgtcgaccaggcattggggcgtttaccgcaagttgaaggaaccggtggtgatgttcaaccatcaagtgaactggttcgtgttttaaatctatgtgacaaattatcccagcagcgtgctgataaatttatctcgtcagaactctttattctggcggcattgaaagaccgtggcgtattgactgacctgctgaaggccagtggcgctaccgtagataaaattgacgcggctatcgatcagatgcgaggtggtgacaaagtggatgaccaaggggccgaagattcacgtcaggctttaaagaaatttactattgatctgactgagcgcgccgaacaaggcaagctggacccggtgattggtcgtgacgaagagatccgtcgcaccattcaggttctgcaacgccgtaccaaaaataacccggtattaatcggtgaacccggcgtgggtaaaacggcaatcgccgaaggccttgctcagcgcattattaatggtgaagtgcccgaagggctgaagaataaacgcgtattgtccctggacatgggcgcgctggtggcgggtgccaaataccgcggtgagttcgaagagcgtctgaaaggtgtgcttagtgatcttgccaagcaggaaggcaacgtcattctgtttatcgatgagctgcacaccatggtgggtgcaggtaaagccgacggcgcgatggacgccggtaatatgctgaaacctgcattggcgcgaggtgaactgcactgcgtcggtgctacaacgctcaatgagtatcgtcagtttatagaaaaagatgcggcgttagagcgtcgtttccagaaagtgtttgtggccgagccttcagttgaagataccatcgctatcctgcgtggtttgaaagaacgctacgagctgcatcaccatgtacagattactgacccggccatcgtagcggcggcgacattgtctcatcgctacatttcggatcgtcagctgcccgataaggctatcgaccttatagatgaagcggcttccagtattcgtatgcagatggattccaaaccggaatccctcgacagactggatcgccgtatcattcagctcaagctcgaacagcaggcattaaagaaagagtctgacgatgcgagtatcaaacgccttgagatgctgactaccgaactcgaccagaaagagcgcgaatactctgagctggaagaagagtggaaagccgagaaagcgtcgctgagcggcacccagaatatcaaggccgaacttgagcaggcaaaaattacgctcgaacaggcacgccgcgtcggtgacctgggccgtatgtcagaactgcagtacggcacaattccggagcttgagaaacagctcgcggcggcaacccaggcagaaggtaaaaccatgaagctgctgcgcaaccgcgtaacagatgtggaaattgccgatgtgctggctcgttggaccggtattcccgtcgcgagaatgcttgaaagtgaacgtgacaagctgctgagaatggaagatgaactgcatcatcgcgtgattggacagaatgaagcggttgacgcggtatccaatgcgattcgccgtagtcgtgcgggattatccgatccgaaccgtccgattggttctttcctgttcctcggtccgaccggggtgggtaaaaccgagctttgtaaagcgctggcaaccttcctgttcaacagcgatgacgcgatggtgcgtatcgatatgtcggagtttatggagaaacactccgtttcccggctggtgggtgcacctccaggctatgttggctatgaagagggcggctatctgaccgaagcggttcgtcgtcgtccttattccgtcatcctgctggacgaagttgagaaggcacaccctgatgtgtttaacattcttcttcaggtattagatgacggccgtttgaccgatggacagggacgcaccgttgatttccgaaatacggtcgtgatcatgacgtcgaacctggggtcagatgtgattcagcagcatttcggtgaagccacctatgcgcagatgaaggatgcggtcatggaagtcgttacacacaacttccgccctgagttcatcaaccgtatagatgaagtcgtggtgttccacccactgggtcatgcgcatatcaagcatatcgccgaaatccagttgcagcgtttgtataaacgtctggaagaacgtggttacagtgctcgtcttagtgatgcggcgctggagctgttgggcaatagcggttttgaccctgtatatggtgcacgtccacttaaacgtgccatccaacaggaaattgagaacccattggctcagcaaatcctctctggcaagctgataccgggtaaaccgatcacgatagatgtagaaaacgaccacatcgttgctaaacagtgatgccataataaggtgaactcagaataaaacttgctgagtaatccgtgatgaaagggccgaatcttaatttggccccttttttgttgttttattatcctaaaagggctggtttgttgaattagtgagcggttggtaattaatttcaaataaacgcttgcggctcctcagaaactccctataatgccgctccatcgacagggaacaacgcagcagcaacgcggtgtgaacaagtcggaaagaattaaaaatgatgatgaccgcgaaaataaacggttgacatcaaatgaggaaagcgtaatatacgccacctcgagttagcaagcgaaagcgcgtaactcactgctctttaacaatttatcagacaatctgtgtgggcactcacaagacgatatcagccacctcggtggcaaaaaatatcaagtcttagagtgaccaagcagtaattcattatgaatgatgtgaagtaactttgagcatcgctgcacttgttgcagcaaatcgaacttttaattgaagagtttgatcatggctcagattgaacgctggcggcaggcctaacacatgcaagtcgagcggtagcacgggagagcttgctctctgggtgacgagcggcggacgggtgagtaatgtctgggaaactgcctgatggaggggataactactggaaacggtagctaataccgcatgatgtcgcaagaccaaagtgggggaccttcgggcctcacgccatcggatgtgcccagatgggattagctagtaggtggggtaatggctcacctaggcgacgatccctagctggtctgagaggatgaccagccacactggaactgagacacggtccagactcctacgggaggcagcagtggggaatattgcacaatgggcgcaagcctgatgcagccatgccgcgtgtgtgaagaaggccttagggttgtaaagcactttcagcgaggaggaaggcgttgtagttaataactgcaacgattgacgttactcgcagaagaagcaccggctaactccgtgccagcagccgcggtaatacggagggtgcaagcgttaatcggaattactgggcgtaaagcgcacgcaggcggtttgttaagtcagatgtgaaatccccgagcttaacttgggaactgcatttgaaactggcaagctagagtcttgtagagggggtagaattccaggtgtagcggtgaaatgcgtagagatctggaggaataccggtggcgaaggcggccccctggacaaagactgacgctcaggtgcgaaagcgtggggagcaaacaggattagataccctggtagtccacgctgtaaacgatgtcgacttggaggttgtgcccttgaggcgtggcttccggagctaacgcgttaagtcgaccgcctggggagtacggccgcaaggttaaaactcaaatgaattgacggggcccgcacaagcggtggagcatgtggtttaattcgatgcaacgcgaagaaccttacctactcttgacatccagagaatttgctagagatagcttagtgccttcgggaactctgagacaggtgctgcatggctgtcgtcagctcgtgttgtgaaatgttgggttaagtcccgcaacgagcgcaacccttatcctttgttgccagcacgtaacggtgggaactcaaaggagactgccggtgataaaccggaggaaggtggggatgacgtcaagtcatcatggcccttacgagtagggctacacacgtgctacaatggcgtatacaaagagaagcgaactcgcgagagcaagcggacctcataaagtacgtcgtagtccggattggagtctgcaactcgactccatgaagtcggaatcgctagtaatcgtagatcagaatgctacggtgaatacgttcccgggccttgtacacaccgcccgtcacaccatgggagtgggttgcaaaagaagtaggtagcttaaccttcgggagggcgcttaccactttgtgattcatgactggggtgaagtcgtaacaaggtaaccgtaggggaacctgcggttggatcacctccttacctcaagatacgcattgtgcagtgtccacacagattgtctgatagatgtaaacgagcaagcgctacctgttgatgcagtaagggaaaccttacgctgatacgaaagaagcgccgggttttatcacctggtgcggcattttcgtgtccccatcgtctagaggcctaggacactgccctttcacggctgtaacaggggttcgaatccccttggggacgccacgccgataatgtgtgaaagacattatcactctgtaccttagcgggtcagaatttatcttaaagatgactttaacgagtcgtgtttaagatattgctctttaacaatctggaacaagctgaaaaattgaaatgatacagctgaacataactctccgtagaagtactgagttatgcgcacctgtattagagtctctcaaataatcacagcctcgaatgttgtcactctttatgagtttataagacaccttcgggttgtgaggttaagcgactaagcgtacacggtggatgcctaggcagtcagaggcgatgaagggcgtgctaatctgcgaaaagcgtcggtaaggtgatatgaaccgttatacccgacgatacccgaatggggaaacccaatgtgatacgtcacattatcgcatggtgaatacatagccatgcgaggcgaaccgggggaactgaaacatctaagtaccccgaggaaaagaaatcaaccgagattcccccagtagcggcgagcgaacggggaacagcccagaacctgaatcagtttgtgtgttagtggaagcgtctggaaggtcgcacggtacagggtgatagtcccgtacacaaaagcgcataaactgtgagttcgatgagtagggcgggacacgtgacatcctgtctgaatatgggggaccatcctccaaggctaaatactcctgactgaccgatagtgaaccagtaccgtgagggaaaggcgaaaagaaccccggcgaggggagtgaaatagaacctgaaaccgtgtacgtacaagcagtgggagcctacttgttaggtgactgcgtaccttttgtataatgggtcagcgacttatattttgtagcaaggttaaccgtataggggagccgtagggaaaccgagtcttaactgggcgtcaagttgcaaggtatagacccgaaacccggtgatctagccatgggcaggttgaaggttgggtaacactaactggaggaccgaaccgactaatgttgaaaaattagcggatgacttgtggctgggggtgaaaggccaatcaaaccgggagatagctggttctccccgaaagctatttaggtagcgcctcgtgaactcatcttcggggtagagcactgtttcgactaggggccatcccggcttaccaactcgatgcaaactccgaataccgaagaatgttatcacgggagacacacggcgggtgctaacgtccgtcgtgaagagggaaacaacccagaccgccagctaaggtcccaaagtcatggttaagtgggaaacgatgtgggaaggcatagacagccaggatgttggcttagaagcagccatcatttaaagaaagcgtaatagctcactggtcgagtcggcctgcgcggaagatgtaacggggctaaaccatgcaccgaagctgcggcagcgacgcttaggcgttgttgggtaggggagcgttctgtaagccgtagaaggtgaactgtgaggtttgctggaggtatcagaagtgcgaatgctgacataagtaacgataatgcgggtgaaaaacccgcacgccggaagaccaagggttcctgtccaacgttaatcggggcagggtgagtcgacccctaaggcgaggctgaaaagcgtagtcgatgggaaacaggttaatattcctgtacttggtgttactgcgaaggggggacggagagggctaggctagccgggcgacggttgtcccggtttaagcgtgtaggggtgtagacctggtaaatccggtttactgtaaccctgaggcgtgatgacgagtcactacggtgatgaagtagttgatgccgcacttccaggaaaagcctctaagcatcaggtaacattaaatcgtaccccaaaccgacacaggtggtcaggtagagaatactcaggcgcttgagagaactcgggtgaaggaactaggcaaaatggtgccgtaacttcgggagaaggcacgctgtcgctaggtggaggaacttgcttcccgagccgaagacagtcgaagataccagctggctgcaactgtttaataaaaacacagcactgtgcaaacacgaaagtggacgtatacggtgtgacgcctgcccggtgccggaaggttaattgatggggttatccgcaaggagaagctcttgatcgaagccccggtaaacggcggccgtaactataacggtcctaaggtagcgaaattccttgtcgggtaagttccgacctgcacgaatggcgtaatgatggccaggctgtctccacccgagactcagtgaaattgaactcgctgtgaagatgcagtgtacccgcggcaagacggaaagacccgtgaacctttactatagcttgacactgaacattgagccttgatgtgtaggataggtgggaggctttgaagcgtggacgccagtctgcgtggagccaaccttgaaataccaccctttaatgtttgatgttctaactcggccccataatctggggtgaggacagtgtctggtgggtagtttgactggggcggtctcctcctaaagagtaacggaggagcacgaaggttagctaatcacggtcggacatcgtgaggttagtgcaatggcataagctagcttgactgcgagagtgacggctcgagcaggtacgaaagtaggtcatagtgatccggtggttctgaatggaagggccatcgctcaacggataaaaggtactccggggataacaggctgataccgcccaagagttcatatcgacggcggtgtttggcacctcgatgtcggctcatcacatcctggggctgaagtaggtcccaagggtacggctgttcgccgtttaaagtggtacgcgagctgggtttagaacgtcgtgagacagttcggtccctatctgccgtgggcgttggaagattgagaggggctgctcctagtacgagaggaccggagtggacgcatcactggtgttcgggttgtcatgccaatggcattgcccggtagctaaatgcggaaaagataagcgctgaaagcatctaagcgcgaaacttgcctcaagatgagtcttccctgggacttcgagtcccctgaagggacgtttaagactaagacgttgataggctgggtgtgtaagtgcagcgatgcattgagctaaccagtactaatgacccgagaggcttaaccttacaacaccgaaggtgttttagagagacgagacgaaagtttcaagaaatcagcttgttcaaagattggttctgatggcggcctgcaggaatgtggaaagcggttggaatgaaacagaatttgcctggcggcagtagcgcggtggtcccacctgaccccatgccgaactcagaagtgaaacgccgtagcgccgatggtagtgtgggtctccccatgcgagagtagggaactgccaggcatcaaataaagaacaagccctagtcgaaagactggggctttttctcgtcggtaatttaagaaattccagttcaagagaaggcccctgtctgacgacaggggcttttttattgcctctgaagcatcaaataaggcaagacttcgctcacaaaacagccattcacttcaatattgagtcattaacactcgccacagcccccaacattctgcttaactagaggattatattgcataaaaaatcatataaattcctttgggctgcataaagcaggagaataaaaaatggctgaagtcacgcgatctacatcgcaggaaattacagacaaagataaaaaaagcaggatatttgccatcgttggcgcatcatcgggtaacctggtggagtggtttgacttctacgtctattcattctgctcaatctattttgcttcgtccttcttcccaagtgggaatagcaccactcagctactgcaaaccgcaggcgtatttgccgttggcttcttcatgagacctattggaggatggttattcggttatattgctgataagcatggtcgtaaaagctcaatgcttatctccgtttgcatgatgtgtgccggatctctggtcattgcctgtctgccaacctatgacagcatcggcagctgggctccggcgctgcttctgctggcgaggctcttccagggactttccgtgggcggggaatatggcactagcgcaacttacatgagtgaagtggctatcgagggacgtcgcggcttctttgcttcattccagtatgtcaccctgatcggcggacagcttcttgcactggtcgtgctggtcggcctgcaacaaatcctttccggcgacgaacttagagcctggggatggcgtattcctttcgcattgggcgctgcattagccttcgtggcattattcctgcgtcgctcactgaatgaaacctccgacgagaaaacgcgcgggcataaagatgccggtagcctggcaggactgtggaaacataaaaaagcttttctgatggtattaggtttcaccgccggaggttcactgagtttctatactttcaccacctatatgcaaaagtatctggttaatacagccggtatggacgccaaaaccgccagtggactaatgactttggccctgtttgtctttatgttgctccagcctattgtgggcgctttatccgataaaataggccgcagaaactcaatgttgatattttctggcctggcaacactaatgacaatccctattctttatgcactccagagtgttactaatccttattgggcttttacactgatcgttattgcattagccattgtgaccttctatacctcgattagtggcttattaaaggcagaaatgtttccggctgaagtcagggcattaggcgtggggttatcctatgcggttgctaacgccgtatttggcggttcggctgaatacgtggcgttgagctttaaatcatggaatatagaggaggtattcttctggtatgtatcagggatgtgtctgatcgcctttattgtttctattcgtttgaatgcgaaaggcaaagagattcagctttaaggtaatgagattttattcaatgagttgaatggacgttgataataaaaagcccgggcaacgttccgggctttttactcagagcgaattacagaatacggctaatgagcctgtcgatacgaatacgtcgtaaccgacgaattagcttacgtacttttaccggataattagggatgctctcgagctccatataatgtgagataacgttcgtatgctcacgaatattatcgagctctttctggcgttggattgtcatctctttattcggatcgtgaatcaggattgcattctcgagatcgagtcgccacgcacgcggattcaagttattaccggtgatcaactgccagcgatcgtcgacccacatccctttaagatgatagctgttatcgccatctttccacagtcgaacaatcagttgcccgctgtcgatgaaacgctgtagacggctaaggaagcgacgcagatttatttcatagagataaggcaaagcaccaataattttgaacggctgatcctgaggaatatagaaatcatttgccgttttatcaccaacgataatttctacctgcttgccgcgacgcagcaaacccataatatttcttgccagcagggcaggcatgttgaaataaggcgtgcagagcgtcagcttttcattggtgcttgccatcagatggtagatggtgcggttcagttcgttctgtttgcccagaccgaccattggcgttaccgcaagctcattctctgaagccgcatctgcaaactgatagctgcaatcacgcagtgcctgacggaactgacgcgtttcgtttttgatctccgggctcttcgggcgatcttcacgatcgagccgctgcaccgcgctggcgctcagcaacgacttctgaatgtaattgaccatcgtgtcggcaagcgtcgggttggtcagcagatgatagcggtcatagcggtatttttcgtgacggtgcaggtaaacatcattcaggctcgcgccgctgtaaatcacgcggtcatcgacgatataccctttaaggtgcagtacgcccagcgcttcacgcgtatttaccggtacgccgtagacagggacgataacgtcaggattctcctgcgccatcctgcaataccagtctgcgttagtgttcgtcgcggcggcgccaatacgcccgcgctgtgcgcggtgccagtcaaccaacacgcagacttctaattcgggacgctggcgttttgcggcatacagggctgataacacatctcgcccgccgtcatcgttctccagatacagcgcaaccagataaatccgttgggtagcattggcgatgacctcaagcagcgtcgtacggaaatctgtggcgctgtacagagtctgtacagcgtcaaccggttggggagtttgggcagttgagcaagatgttgttgatgtttattacgcttaaatttagacaacatcacagtgtgcttcttctctcttcaatgaatggcaattgcggcatatcaagacaaaatagaccgcacaatcggtcgataataccattgtcacctccgatgtgcgcaagttttgccttaaaggctgccttaaatccgttaagccgcgtcatcaagcggtaaataaagtcggctaaaatggggctatttcaccgtttctgcttgggactgttccgcctgtaaggccaaagaaagactgactattccctcagaaaggtgaacgtcgacctcaaaaccgagcttacgcgccagcgccagcatgccgctattgttaggcatagtgatgcctgccagacgctgaataccgtgttctcgagtgtacgcaatcatcttagacagcagccttccgccaagccccaaatttttcaaatcagagcgcaccagcacagagaattcggcgtcgatgttatcggggtcagaaatcgctcgcgtcacgccgattatctcgatttcatgcgtctgaccgcgtaccgccacgaaagccatttcccgatcgtagtcgatttgcgtcatgttggccaaatcctcatgagtgaactcattgatctcgctgaagtagcgataatagaggtcctctttggtcactttctgaataaacgccttcagcagaggttcatcttcgggcaggatagggcggaacaggcagggagagccgtctctgagggtaaccctctcttcaagacgctgaggataagggcggatagccagccgcgattgttgctcatcaatatccgggctcagctggagcgagacatcaagcaacgtcagttcgcttcccgaggccaatagcggatggatattcagttcggtgatttgtgggcagtcaataatcaggttagatacctgcaccagcagatgactcagagcgggaatatccagcgggcgaagcgcattacgctcacgaattttaccgcttttcagcccttgcagaacgagataacgagccagcgccatattgagcggcggcagcgccacgacagcgtgctgctcagggcgccattcgatgcctccttcgccaagcatgataagcggaccaaagacagcatcgtgctgtacaacaatgcgtagttcctgtgcaccgggcctgttagccatagtttgtactaacaaaccattgatacgcgcctgaggaaacgcccgttttgcacgatcgaaaatggcatcggcggcttggctgacctcatgcggcgtgcgcaggtaaagcatcacccctgcacctcagagttatggtcgatatccggcgaacgaagtttgagtgcgaccgggtagcccacacgcccggcgatttcgacggcctcgctgctgtcgctggctatccaggttggcagcaccgacatgccatagtccctgaagatagccctgacttcgtgagtatcgaggcgggtggttccttcatccaatgcttgctgaataagtcggtgcgcgccgtcggtattcttgttcaaatccagcggcagggacggcgtctccttaagttgcttctggttgcggcgatattcaaccatgtgcataaacgccgtcaccgcgccttcagggttcgataggtcgggagtccggcctcggtaaacagccgacgcgcttccacggaggagaattctccacaccagttagtgagcagtgtcacgcgtttgccgcgcggatgctgctcgatggcctcaatcacccgttctgatgtcatggtgcccggtgaggcggcgcttggcgcatggataatgagcagtgcgtcatactccttgctatccagaagcgtagtaagcactgactgatagagctgagggctggcgtcatcgcgcaggtccagcggattccccaccgtcacgctggccggcagcatgtcacgcagacgttgagcggtttcattatccagtgacgcaagcttgccgtgatggcttaacagctggtccagagccattgctgccggtgccgcgccgttgctaacgataagcaagcgctcaccccgtagcggacgcatatggctgagcgtttcaacggcggaaaacagttcatgagtatcctgcacgcgcagcagaccggcacgctgaatcgcggcatcgtaggcggcgtccagacttaacgggctgttgagcagcgtttgagcctgtgcactgcggccacttttgataaccagaatcggtttattgcgcgacgcgcttcgcgaggcggagagaaaacgacgggcgtcactgacgtgttcaagataaagcagaatagcgctggtcttgctgtcacgcgccaggaagtcgagcaggtcgtcgacgtcgatgtccagactgtcgccgagagagataaagtaggagaaaccgacggaacgctgctgtgcccagtcgagaatagtattggccaccgccgctgactgcgagataaaagccagtttgcccggcaggataggcaccggtgagaagctggcgttcagccccagccagggggccagaattccaagactgttagggccgagcaggcgcattgcgtagcgcagggcggtacttttaagctcagcaaactgctgctgatgagaggacaggacgataaccgtcttgcagcccagttcacccaactgctcgagcagagcgaggttacggtcggcgcgggtgcagataatcgccaaatctggcgtcatcggcaggctagccacattgggataggccatgacgccgcacactgcctgccaggctggggtgaccggtagcaccggtccttgaaaccaccggctaacaagttacgcatcatcagatatccggcgcgaccgggtttatccgatgcgccgagtactgctattgatttgggtcgtaataaagcttctaaaccgcgctggctcatcctgcctcctgttaatcacgttaactggattctagaggctttcgtcggagtttgctgtgagttgatgcaccggatgatgaggttttcctgctaaatactgggtgcggaataaaccaaacaggcctgacatgctctctgacgcctgaatatccccggatttttccaataatgcggcggccacttcgacggtgcaatgttgatcttcgcgcggtgattctcttaacacatagctggattttgcgctcacatcgagcgagaaaaccggcagtccgtccagatacgggcttttacgaaacattttacgcgcttcgttccaggtgccgtcgagcatgataaaaagcggcggttttccccccagcggcagcgcggtaaagactgggcgcggtggctcgacaaacgaggcgggaaacaccacgtaaggttgacgcgtagggtcggcaatggccgccaacagcgcagggtcaacctcggtgcgtgaccacatgaacgcctgcgtattcggcaggatatcggctatcagacgcccggtattgctaggcttcaagggttcggtgtcgaacatgaccagacaaaaacggctgtcggcctgctgtggctcaatatggctacacaggcagttgcgtttaggcagcaggcatccctgacagcgaatgacgcgcgaaccgcgtgccagataggggcgtgttgattttgcgaggcgctcggcgcgcaatcgcagtacggcgttgtctggcattgaaggtcctgcaacagtaattcggaagcgggtattgtaatcggatatcgggcacatcggtagtcaatgtcgataagcggggaaggtaaagcctggatttagaatcgcagtgggaaaataagccggcccctccgacaatggctgggccgaccaccacgttatgcgttacaatgattcattgagccattggttgaacggggttttaggcaaggcaccgctcaactgatcgaccatcttaccttggttaaataccatgatggtcggaatgctgcggatacgaaaacgtgcgcctagctcaggctcggcctcagtattcaccttgataaagcggactttacccgcgcgttcgcccgccacatcttcaaagataggcgcgaagttgacgcagggaccgcaccacggtgcccagaaatcaatcactaccggcaggtcgtcctgcaagtatttatccagcgttgccgccgttgcgtgcacgacctcaccctcaaatagggaatgaccacagcggccacatttggctccgtcgtcaatacggtcttcaggcaagcggttcgtcgcctgacatgatgagcaaatcgtattaatagtcatagttagcctctgagattcagaccgcatcctgtcaccagaaaccttggccggtggctaagatacgaagatatacggataattatgcggtttggttacggcgtgaacaatgcgatttacccaatgaatacgatagtttttagcttttggtctaaagcaagtggcttaccactcagacatcaggtaatcttcgcgcccagcgcgtaggtggagaaaataatgaacgattcattcagtggcaagaacggcaaagtcaaagtgatgtacgtccgcagtgacgacgacggcgataaccgaaataaagataaacgtccttcaaacaataaaggacgtccaggtgataaagctcgtccgggttcccgtccctttgaaggccgtaacaacgagcgtcgcggtagcgattcacgcggaggtgactcacgcggtgaagcacgcagtcaggatgctcgtcgtggcgacacgcgtccgcgtcgtcccgctcgcgatgaaaatgaaagctctggctcttcttcaccgtggcaggactcccgtggaagacagtttctcgtgcacccagcgacgaatcggcccccgatcacggtggtatcagcggcaagagcttcatcgatccggagcagctgcgtcgccagcgtcaggaagagacccgtgtttacggtgagaacgcctgtcaggcactgttcgcgagccgtccggactctatcgtccgtgcatggttcgtgcagtcagtcaccccgcgtttccgcgaagcgctgcgctggatggccgcgaaccgcaaggcttaccacgtcgtagaggacgaggaactggcgaaggcatccggcaccgaacaccacggcggcgtatgtttccttatcaagaaacgtcagggcctggatgcagagacttatctgcaaactgcgccggcaaccgactgtgtactggcgcttgaaaacgtcggtaacccgcataacctcggcggtatcatgcgtacctgtgcgcactttggtatcaacggaatgttggtgcaggaccctgcacagctcgagtcgggtgccgcagtgcgtaccgcagaaggcggtgcagaacacgttaaagctatcatggccgacaactttatcgatgtattagccagcttccgtaaagccggttacaccatcgtgaccacctctagccataaagggaccgcactgggtaaagccgagctgcctgccagaatggtactggtattgggtgaagagagtgaaggcctgtcggacagcgcatggcagcagggcgaccttaacgtttccatcggcggtaccggtaaggttgagagccttaacgtttccgttgcgaccggcatcctgctggcagaatggtggcgtcagaatcaggcctgatttttaccttaagtagaaatagccttaccctaaaacggacgcgtaatgcgtccgtttttgtattctgttttcgataaaagattatttcagcccgatctgctggcgatactcaccgggtgtgacgccctgaaaacgtttgaaggcacggcccaacgttattgctgagtcataaccaacgcgttcggcgatggtagtgagcgttaactgggggtgacgcaacaggcagcgggtacgatacatccgccactgggtcaggtagccgcccggcgtatcgcccgtcaccgtcttgaagtgtaccgcgaaagaagaacgcgacatcccggcctgcgaggccaacgtcttgagactccagggttttgaaatatcttgatgtattttctggataataccgctaagtcgggtatccgatagcgcggctatccagcctcgctgggtctgctcccgtaggcaatgtgcccttattgcctgcacaaacagtacgtcggccagtctgcttatcaccaccctcgaccccagattttgttcgagcgtttcaagcgccagcagttttagcgtggcctcaagcagcggagaacgcgtctcatcggcaggaatgatgaccaccgagggcagcagcgacagcagaggttctgcacccgcgctgtcaaaggtgaaatagccgcacagcatatccgccgcctcccctcaccgccaaaactggcgtctttccccgcgcagtcggcgaacacctcttcacaccagcgggttgggctggtgggcacatcacgcagcgaaaacaacgtattgggcttgacgataaagccttcgccctgttgcagcaggattggctcgacgagaccgtcaacgaccagccatccgctgccctccatcataaagccaaagcggatcgagccgctcttaacaaagctgacgccccagggcgcacgcggcgtgagtcgagaatacagggcgctttgcaaccgcattgcggcaaatacgtcgtcaaggggatccattatatgctcgcagatttggacgataggtcggtataaataccttttcagtcattcaacgtccagaaaaaaaccgtagggtaaaggcatactctccgtttaatgaaaggaaatcgtgatgcaaagctatcgtcttgaacgttttggcagtcttgaaggactgcgtctggtagaggaagaaaagccgactccgggacgcaatcaggtactcatcaaggtccgcgcctgtagccttaattatcgcgatctggctattctccacggcaccggaaccctgtcgcccaaaccaggacttatcccgctgtcggacggcgtgggggaagtggttaaggtcggtgaggcggtgaacctgtttaaagttggcgatcgcgttgcaggaagctttttcccttactggtatgcgggccagcttagtgccagtgccggtcgcggcgcttatggcactcaggccgacggctggttgacgcagtacaaagcggtggatgaagagacgctggtttctcttcccgactatctcagttgggaacaggcagcgaccttgccttgtgcagcggtcaccgcgtggaacagtctgcaaaaatcacgtccgctgcagccgggggaaaccgtattgacgcagggcaccggcggtgttgccctgttcgccgtacagtttgcgaaattgatgggcgtacgggttattgcgcttacctcgacgggcgaaaaggcggccgtgctgcgcgagttgggtgccgattacgtcataaactatcgtgagcaccccgaatggtcgaccaaagtgcaggaaattactcagggacaaggtgtgacgcgggtggtggaagttggtgggccgggcactttaacgcagtcgcttctgtcgagcgcgccgggcggtgagatagcgctattaggattcgtggccaagggcagcccggcgattgattttatgacgctgttcaaaagcggtgcaacggttcgcccgttcagcgtcggcagtcgcgaagactttatcgccatgaatcatgccttggccctgagccagcttcagccggtggtggacaaggcatttagcttcgaagaggccgtagaagcctggcgctatttcgacaaccgccagcagaccggtaaggtcgttatttcgattaactaagcgaggctgcataaaaaaacggacgctttatgcgtccgttttggtgtctgtcttcaggctgcgaatcagtgtgcgccgccgccgtcaccgcccgcggtgaagggggctcgcgcgaaccacaccagaatcagcagcagcaggaaaacaccgcccgctgcccagaagacctcattggccgaaataataagcccctgattagtaatctgttgtgctatccagcccgacgcctgctggtggctcatgcccatgccttgtagctgtgcataggtctgctgtgttgcggggtcaaatggcgtaatgctttccgtcatgtgggtatggtgcagcgattctcggtccgtccacatggtggtggtgatcgaggtccctatcgagccggccagcgtacgggtaaagttcgacaggctcgatgctgccgccattcgtgaaggcggtagtcctgataatatgatggttatcagtggcataaagaagcaacccaccgcaaagccctgaataaactgcggccaggccgaggcgccaaagtccatccccggttcaaacgtgtacgctcgccagtagaagcaaaaggcatacatgatgaagctgaatgtgaccagccagcgcatatccagtttatgggcaaaacggccgatgatcggcgacatcagaaccggcaaaatccccaccggtgctgacgccagccccgcccaggttgccgtgtagccaaatacctcctgcaacagctgcggcaacagaacgatagagccgaagtagagcatgtaggccagactgatacacagcgtaccgatcgtgaagttgcgcgacttgaatagcgagagatcgactatcggattctcgtccgtcagctcccagactatcaggaacgacagcgccaccacggcgacaatggttagggtgattatctccggcgagttgaaccagtccagctccttgccgcggtcgagcatcacctgcaaacacccaatccccaacaccagcagcaccagcccacggagtcgatcggtctgatctgcgtttcggtttcgcgccccttgagggtgttcaacgtcagcaggaccaccgcgattccaatcgggatgttgatgaagaagatccagccccagtgatagttatcactgatatatccgccgaggatcgggccacagatgggcgcaacgatgacggtcatcgaccacagcgccaacgcggtacttcgcttggcgggaggatagttgttaagcagcagactctgcgacagcgggataagcgggccagcaaccagcccctgaattacgcggaagaagattagcatttccaggctgttggagatcccacacagccatgaggcgagggcaaacagccccgtcgcccacaggaacagcctgacctcaccgatacgcttcgcgagccagccggtgataggaatcgagatggcgttagccacgccgaacgaggtaatgacccacgtgccctgggagtttgaggctcccagattaccggcgatggtcggaatagccacgttggcgatggtcgagtccaatacctgcatgaaggtagccatagcgagcgctaccgtcatccaggctaagggcgcgccttctagcggttttctagcagccacgatgacctccgaagaactcagcccgcattagcattgataacgtcattgataatggcgttaaccggtgccagatttaacgtcagggccgatgtctgatacagcggcgttgaacgtactttatcggcaaggaccagtccgtcgaggttctgcgtatccaccgtgaccagcgttgacaaaccgatgcgcagcggatgtttcttcacttcgttagcatccagctcaatacgtaccggcaggcgctgaaccactttgatccagttccccgtcgcgttctgggcaggcagcagggagaacgcaccgccggtacccatgtccatccccaccactttgccgtgataaaccacgtcgtcaccgtagatatcgctgacgacagtcgccgactggccgatacgcatgttggagagctgggtttccttaaagttagcatcgacccagacgttatcggccgggaccaccgccattagcgccgtcgaggggctaattcgctggcctacctgtacggtacgacgagagacgtaaccatcgaccgggctgacaattttggtacgctgtagcgataaccaggcatcacgcacctgcgcggcggcctgcaacacctgcggctgctgagcaaccggtgtgttgaggaccatcgcctgattggcgtttaactgctgaacggccacgtcgagctgggctttagcggtgtctacggcgtcatgggcgtgttgcaagtcctcgcgaccgatagcatccactttacccagaatcacgcgacgtttcaggtcggctacggcctggttcagctgggtctggcgcagtgccacgttagcctgatactgtttgctattgataaccagctgatgaacctgacgcacgctgttggccagcgcagtcttggagcgctcgaaggcctgttcggcgtcggtcggatccagaaccaccagcgtatcgcctttcttgacgaagtcggtgctgtcaaagttaacgtcggttacgctgcccgatacctgcgccataatctgcacctggttaccggaaacgtaggcatcatcggtatcttgataatgacgcaataccaaaaaccagtagatcagataggcaatggcaaggatcaaaaaaacaccagtcaaaataagcagggcgactttgcgcgatctctttttattgtttactggtggcggggtcggctgttgaacttccgcgttttcgctcatgtttttctccacgctgagtctcgttattatgctttgttgtccgcagccggggcctgatagccgccgcctaatgcacggattaaactaattttcgcctgcaaaacgttgcttgccgcagtcaaggcggcctgctgctgttgcaggagagaagcttggctggtcagcagctgatcgcgtccgatggtgcctgcggaataacgtgcgctggcaacgcgataaacctcctgcaacgatttctcggcagaaagcgactgttgcagctgcagggcagagctattctgaacggtcagcgcgtcggcagtttgctgaatggcattcagcagcgtctggttgtaggactcaacggactcgtcatagagcgctgactcttcacccaatttgctgcgtagagcgcccgcgtggaaaataggcagtgaaatcgccggcgcgaggttccaggcctgactcgctgcttcaaacagattcgggctggtggcgccgtagttggtggtgcttaaaccggcaaaggcgctgatcgacaggctcgggtaaaagtcttttttcgcggcggcaatacgctgtgaataggactcgaccagttcgcgctgtgccacgatgtccggacgtttgcccagtaaatcaatggtcaggtcgcctttcggtgccagcaggtcatcgccgggcagggcaacaggatgcagattgttcatcgcgtccgggccttgtcctgccagcgcggccaactggtgcttaagttggtctatctgtgattgcagcttaataatctgctgcttggcgctatcggcctgagcctgcgtctgttgcggaatgtcgataccgtaaacgcccgcctgatattgggctttacgcaggtcggctaaacgctggttgttgtccacttcctgttgcagaactttttgtaccgcatagttggcctgcaattgatagtaggtagacgccaccgagctcgacagcgagagcgctgcctcagcctgctccgcgcgagcggaatcgacctgtgccttggcggcattgacctgattgcggtatttcccccaccagtcaaactcgtagctcagattaagcccaagattattggtggtttcatagaccggactccccggatacccgttgaggaacggctgataggtattctgcgatatcttctgtcgattgctcgaggcgttaaggtcaacataaggcccgttggccgcgctagtttcacccatcacgctctgtgcttcgcgcacgcgcgcagcagcctgacgtaaagacggcgaattttgcagagtctgggtcattaaactatcgagctgcgggtcttgcaggctacgccaccactgtgggcttatcgccagcgagctgaccttcggctgcgccagcttaagctgctgattgctcagcagcgtggactgcggagcaatattattgctggaggcgcaacccgccagcaataaaacagcaaacagcggcgtaaatctccagctgactggaagagacatggattaattacctgaacaaaaagtcgattataatgttgaggttgcatccatctggtcgagacgggtcaacagcttgcgcgtgagctcttccagctgtttctgctcttcaatatcaagagttgaccagagaaaatgcaaacttttatgctgaggcggcaacagtttctgaataaaggcttcaccgtctgcagtcagatgcaaatgcaggcagcgacggtcgttatcgctctcacgtctttcaatccatccgcgcttttccaactcatcggcaatacgggtcgcattggtacgagaagaccccagcgcagcactcagctccgaaggctggatactgtgtgattcccgtgcatccagcgtgatcaacgccatgaacagcgtttcgttaattccttgcgctttcagcatcttgtttctattttccagcagcttgctgtgcatgtgcatacacagtctggtcagcagaatttcctgatacgggaaatctttttgctttttagcgcggaaatttaacatgtgttcgataggtgcgaatgaactttccatcgtgagaaacctcattagttacaattgagatagtaaccagtgtaattaataatgtaaatgttataagccattaaatagttagctattcgtgtggtcttgtaacggttgaaagtaaaactttttttttccggcgaacagggtgaatttgctcgcctttttgacacaatctttatccggaaataagcatcaccttgaaaaccaacccgtaaatgacggcgccggtgagcgtggcaaagatgatgcttttgctgcgccagaaggtcagcgccagcaccacaaatcctgccagcgtcggcagcagtttctggctgtcgcgcaggatctccggcgtgcttgataccacgagcagcgcacagatagaggcgatcccaatactgtccagcattcgattaatccaggctggacgatgcgacgtgtctttttttcgcacgccgcccaggcgcagcgggaggtagcggaacaggtaattcgccgtccccaccaccaaacaaacgagaatgacttcagctttcattgttgaggttcctgaccgcgtggacatgggccggttttttcaacgatgccagacagccccacctatgccgcagaggatagcgaccgggatggaataaaacaggagaccgcccagcgcaccgaccatcgaggcaataaacaccaggctatgctgacgtctgaaagccgccagaaggaagctcagaaagagcgccggcagcataaaggacagtgacgcctcaatggccggataagcctcaagcgggccgtcggcaaacagcgtgcccacgccggtgccgaacacccaggaaatccatgaggtcagtgcgaggccgcacatccagtttgcgctccagctccgcttgttgcggatgagcttagttgtcgccgcggcaaaaacttcatcggtcaagccaaaggcccagactttggtcttggaaccttgaatccgcgagcccaaacgattgcgcaaagatgggccataaaggacgtgtctgacgtccatggccatcacggtgagggcagaaacccacagggacattccagcgctcagcagcgcagtaatcacaaactggctggcaccggcataaatcaggatggaaaaaagcaaactttcgagcggggtaaaaccatgttttaccgcacttagcccaaaggcaaaagcgacggggagatagccaatgactatcggcaagctatcaaagacaccttgaacaaacgttgactcttcgggtgccgaagccatttctgggtctgtgttgctgtgcataagaattttattgctaaataaaagcaggatgtttcgttagcgtataatttattgaaaaaataatatcagactgttagtactctttataccctttggttcaaaaaaaatttcactaataactattcgcatgctaatcaggggcgtgatcatcacgcccgaaacactttctcagccgaatctgtgcttgtgtccaaacagccagacgaccagattgatgacgcaaaaaatggcaccggctgtacagacgccgtaccatcctgccgcctgaaacgccgccgctgagacgaccgaacctgccgcaccgccaatgaaatagctggtcatataacccgccgtcaggcgattacgcgcctcgggcatcagtttataaatgacgctttgattggtgatatgcactccctgcacgcagaggtcgagcacgataatgcccagtatcagcgagatgatggagtgctggccgtaagccacggcagaccacgagagcagcagcaggaccaggccacaggtggtcgtcagctgagctttgcctttatcggcaagatgcccagcacgggtggcggccagtgcacccgccgccccgaccagaccaaacagcccaatcacaccctcggaatagccgtagctcggcccagccagtagaaacgccatcgaggtccacagtgcgctgaagttggcgaagataaacatgccgataagcgcgcgggtacgcagcaccggcgtgaagaagaacagggtaaagatagacttcattaactggaggtagttgaggtgagtattctgcttgtgctgcggcagtacgcgccacaggactgcggacataatcaccatcagcacgctggcgacccagtatacggtgcgccaaccgccaagtgccgccagaaggccggagacggtgcgggccagaagaatacccagcagcaggccggacatgatcatgccgacaatcttaccgcgccgcgcgggttcggccagcgtggcggcaagcggaaccagtacctgcgcaacgacagaaaacagtccggtcagggctgtaccgaccagcatcatggagattgacgtcgagttggcggtaatcagcagtccggccgccgagagcagggtcataacgacaatcatgctgcgacgctcaaacatatcgccgagtggcaccaggaacagtagcccgaaggcgtaaccgagctgggcggtagtcacgataaatccggcctgattgaccgaaagatgaaaggcccgggcgatggtttccagcagaggctgggcataatagttgcttgctgccgcaagcccggtggcaacagccataagcaggataagacccggactcaataccgcttgctgctgagcagaagaatgggttgaagttgtcatagaattcatttcttttatggggaagattttaaggattacgcgaggagtatctgttaattaaaaataataaaccaatgtataattatcatctcaactatctcgttttgagatgaataaatgaatttaaagcagatccgctttgccttggccgttgctcaggaacagaacttcacccgagccgcaaagcgttgtcacaccgtacaatccgcattgagtcaccaaatagccaagctcgaagaggagttaggcagcccgttattcgaacgcacctccagacaggtcgagcttaccgccgcagggcgagcctttttggcgccggccgagcagtggctggccgcgcataatcatttgctggataccatggaagcgttgaaaggtgagataggtggcaccctaacggtaggaacgatatctacgctgaatacgattgacctcattgggcagcttgcgcgttttaatcagcgctatcccttggtgaatattcgtttatacgtcgcgatgagcgaaaaactgctggaggatgttcagcaagcgcgaaccgatgtggcgtttgttgggctatggcccggcgataaggaggcgctggcaatgccgcataagctgttgaccgacgagccgttggtggccatggtgagtcgcgatcacccgtttgccggtcgtgaacgtctgcgcctgtctgaattgtcccaggtacctttagtcgatttttatcagggttccggtgccagacgacaaaccgacaaggcttttttttccgagggcataacgcggcacgtcagttttgaaatcgatcacattgagtggctggaaaatatcgtccgtaaatcgctggctgcggggatagtgccgttgtcgacggcggaacacgccaggggattggtctcgatcccgatagacagcgctatccgacgccaggtattttgcgtctggcaacacagtttgtcggccgtcgccgagcggtttatggctttctccgaggaggagttcagagtcagcccctagctttgcctggtagagcccaataaaaaggggcaacagaaaatttcgttgcccctttttccccaccatcagatgccgttaagcgttattttgctgcggcagcggcctcttgaatccaaccgtcgaaaatagcctggtgagccttgatccagccgttggtctgcgcctcgatgtcagcctctgagctttgaccgttgtgcattgccgcattctgcgcattaatatcggccagtggcagcttcatgatggcgaacagcttcgcggcagccgggttagcctgcgcccacttgaggttagccacgatgtgcatggtactcaccgggaagccatagttgcggccgtcaggcagtttggtatcggcatttttgtcgcccggaataaccgagaacggcacctgtaaccagacggtatctttgcctggcaccagtacgttgctgacccagtacggcgtccaggtgtagtagaagataggcttaccttctttatagcgggtaatagtgtcagcaatcatcgctgagtagttaccctgattgtgctgcacggtgtcggtcaggccgtagtctttaatctgctcgttcagcgccgcctcacagccccagcccggcgtacaaccggtcaggtcggccttgccatcaccgttggtgtcgaacagcttggcgattttgggatctttaaactggctgatgttggtaatgtgatatttctgggcggtttttttatctattagatagccctgtgccgcgccggtcacgtaagtgccttcgcggtagaacttctgcttgccaccggccgcgttaaacatgttgtcatgcagcggtgcccagttggcggccataaaggtgccgtcgccttctgcaatggtggtgtaaccgacgttataatccacttcacggataggctgaacggtataaccgagtttttccaacgctttatcgaccagcagagtctggaaagtctcttcgctgatggtgctttggataggcgtcacggtgacgcctttgcccggaaggtcagccgcaaaagcggacgcagaacccagagtgctcagagcggctatcgcccaaagagtctttatcttcatcattattgttatccctaattatttattcgccgcggctttggcttcgtcgagccagccgttgtaggtcgcctgatgcgctgtaatccagccacttacctggtcttgaatatcttgggcggaagattcgccgttgtgcatgctcaggttctgggcgttaacgtccgccagcggcagcttcatcaccgcaaacagcttcgcggcggccggattggcggcggcccactgtttgttggccacaatatgctcgttattaaccgggaaaccgtagttcttgccgttaggcagcgtggtatcgagatttttttgtgaacccgtgttggccgagaacggcaccgtcagccagagcacatccttgcccggtttcagcacgttgctgacccagtaaggcgtccaggtgtaatacagcaccggcttgccctgacgatagcgggtcagggtatcggccatgattgccgcgtagttgccggagttttgctgcacggtattgctcaggccgtaggctttgagctgtgcatcgataacctcgccgcagccccatcccggctcacagccggtcaggtccgctttgccgtcgccgttgtcgtcgaacagcttggcgagcttaggatctttcagctgcgacaggtcgtggatgtggtacttttcggcggttttcttgtcgatcaaatacccctgcgctgcgccgctgatgtaagtgccttcacggtagaacttctggttgccaccggccgcgttaaacatgtcggtctgtagcggatcccagttaacggccatgtaggtcgagtcaccgctggcgatggtggtgtaggcaacgttgtaatccacctcgctggtgggctgcacgtcgtaacccagcgctttcagcgcacgattcaccagttcagtttggaaagattcttcggcaatggtgctttgcagcggtttcactactacgcctttgcccggcaggtcggccgccatggcctggctgccgagaagggcggttaacgtcagggccagcaggccgccgtggcgtaatttttttgaatgattcatcgctgcgatcctcaggcttttttagtgaaaggtttggtgaccagaccgattgggccatgagtaaaccagcgatggccgcctttactgcgacggtcacggcctaatgcctgagtcaggcggtccagaataatcgccagaataacgatcccgacaccgccgatagacgcaaggcccatatccagacgaccgataccgcgcagcaccatctgacccagaccgcctacggcgatcatcgaagcgataaccaccatcgacagcgccagcatcagcgtctgattgatcccagccataatggtcggcattgccagcggcagctgaaccttgaacagcatctggctcgggcttgaaccgaaggattctgccgcttcaatcagatcttcgggcacctgattgatgcccagaattgtcagacgcacgataggcggcagcgcaaagataatggtgacgaccacgcccggcacgttaccgataccaaacagcatgactatcggcaccagatacacgaacgccggggtcgtctgcatggcgtcgagcagtgggcggataatcttggcagcacctttgctgcgcgccagccatattccgagcggcagacctatcaatacgcagaagaacagtgaggttagcaccagcgccagcgtgaccatggcctgagaccaggcaccgatcgcgcctatcaacaccagagaaaccagcgtggtcgcacccatgccaaaaccggccatctgccaggcgatcagcgcaaagatgacgatcgcgatcggggcgggcagcgactcgaggccgtgctgaaagccactcaatacaaaatcgaccgggacacgtatcccctggaagagcgggcggaagtgcgcaacaagccagtcgatcccgtcggttacccagcggtcgagcgggataagcgtgttgtggaaaggatccaaaatattaaagtgctgatgctgctctggcgcgacgttcagccagctgtcgctgctctgagccgcggcgtgatggcctgcgtccggcgtgctggtggtagcaccgctattgtcggcgtcccaggggtcagtcgccgcggagtcggccggcgaagcgctctgggttgccgcatcgctgctgccagcagcccaaggatcgctggcggcgtctgcggcctgtgccgcctgcgcatgttgaactatcgtactgttattcaatgaattaataatttgctgtgtcattctgttgcccctctttatccaacgcctgaagcagcatggccttggaaataattccgatatagttattctcctcgcagaccacaggcaccgcacacggtgcagcggcaacctgtgagataagctcgctgagcggcatgtctgccggtaccggcgccggtaattccagcagggcactttccagcggctgattttcctttagtgcacgtttcagagaatctgccgacacaacgccgataaatttctgtccgcgttcaaggacataaccatattcacggtcttcatcttcgagcagcttgagggcagcacgagggccaaaaccaggggtcttacggatgagcgtcaccggacgacgacgggcgatgtctttggcgctgaatacctgactgatatctacaccgcggaagaaggtgcgcacatagtcgttggccggattgttgaggatttcctccggcgtgccgacctgcaccacttcgccgccctgcataatggcgatacggtcgccgatacgcatggcttcgtcgagatcgtgggaaataaacacgatcgtacgttgatgttttgactgtagtttgaccagctcatcctgcatctcggtgcggataagcgggtcgagggcagagaacgcctcatccatcagcagaatgtcgggattgttagccatcgcacgggcaaggccgacacgctgacgcataccgccggaaagttcgtcgggataggagtgggcatagctttcgagaccgacctgacgtagcgcatcaagcgccttctcgttgcgctcgctgaccggaatcccggcaagctccatcccgaaggcggtattgttgagcacggtgaggtgaggcatcagggcaaaggactggaagaccatgctgattttgcttctgcgcacctggcgcagcttggcgtcggaaattttggcaatatcttcgccgtcaatcagcacttcgccacgggttggttctatcagacgattgagaaggcgtaccatggtggattttccggagccggaaagccccatgatgacaaaaatctcgccttcttcaatggccagactggcgtttttcacaccaagtgacagacccgtttttgcaaatatttcttcttttcccttacccgcatcaatcagcttaaaggctcgctcaggttgctcgccgaagactttatataagttcttaacttcgattttaattgccatgcaatttttcgtttccttggtcgtattttaaatactgttatttgaatgagtgtgatagaaatttcctgttaacggaatatggtgcggcttataccctaacacacttagaatctgagacaagtctcatggtttccagctgggtaattaggaaaggtctgattattccccgcattttcgcgctgaggccttgtcggttaagggatatttgcgtggggcgttggttaattattatttgtcatatttatagtgtgaattgagttggcgctattaatttacgttgcggattttaattgttattaacaatttaaattgttgattttgttgtttttatttttaaaatttagccagagatttttacagtgtaaataaaagtgattccccctatttcatcctttttatgattttcaggaattaacggggaaataggccattttatggcgggttgatcgaggggaattaggctgcttgagaggcaaaaatacgcggaaaactcggtgcgatctcggtgaaaatacgccgctattcggcggcgttttcggcgtgattagctttgcgatacaggcgtcttggatggccgatatttccatactgcatctcgaccataatgaacgccgtttctacacaatattcgagatatcggcggcccgtagttttgctgatcccgacctgttcaaccacctgatcgaccgaccagttacgctccggctggcgaatgaaaacctgcttgatcagttcgagggtattaggctcgatgcccttggccaacggggcttctggctgttcactgcccggcagattaaagagcttgtcgagactctgctggtcgagcgtggtcacgttgcgcagcgtctgcgccagctgcataaaacgggtgagcgaactctgcaagcggtgaaacgaaaccggcttgataatgtagtcgaacgcccccgcgcgcatcgcctggctacaggtcgtcatgtcgctggcggcggtgatgaaaatcaccgagcagtcaatgctcttaagcaacgatgagttgataagctcgatgccctgaccgtcgggcaagaaattgtccagcaacaccagccttggccggtatagctccagtagccttctggcctgtgccagcgtcggggcaatgcccaccacccgcaggttgaagttttgctcgataaactcacggtgcagcaggccgaggtggctttcgtcctcaacaattaatacatccatgacgctatagttattgttcatagtgctttcttgaaagtaggtggctggtcatcgtttatgaaagggatgaagaccgtaaacacggtgccctgtggccgattatcggagatttcaatcatcccctgcgcctgacggacataactcgctaccacataaagcccaatgccatgttcgctgccggtgtgctcagaatggcttacaggcttgctgctgacgccttgttcgaacaggcgggcgcggatgtcggcgtcgattccgccaccgctgtccgcgacctcaataatcagctggtcattgctatcggtcaaataaagttcaaccggcgcgtgcggcgcatcaacttttaagctggcttccaccgcgttatcaataagattgccgactatcgacatcagctcgttttcgccaagcgcggcgggaggtgtgcgagctgacagccgggatcaaagtccagctcgatgcccttttccttggcgctgacgtatttgccgagcagcagaccgcacagcgcgggcgatttgaagcgctgcgagacgaagtccagcaccgcttgggcaccctctgactgcgcctgcacgtagcgcagcgcttcatcataacgctgcatttgcagcaggccggcgagggtggcggtccagttgagctgctcgtggcgcatgatgcgaaggttatcggcgtagcgtgtcacctgactcagctggctgctcagggtattaatgtcatttttatcacggaagctaaacacccagccgtgcagcgccggaggggcaattcgagcggtacgcggttaacaatcaccggacgctggttgaacagcgccatctcatcgtggcgttctcccgttgcagcctgcgcggtgaagaaatctggcgcggtggcaatggcatcagtaatcggttggccaatgagctgcgcttccggctgctcgagccccagcaactcgcgtgcggcacggttgatggtcagaatattcagccgatcgtcgatggcgactacgccctcatagatggcttccatcagcgccttttgctggcgtaccagcaaagagatatcacgtggctcaagccagaacatctgctttttcaggtttttgctaaacaaccatgagaacaggaacagcgccaacagcagcagcaggccaaacagcagcgcctgcgccagctgacgcagggtgatgtcgttgatgtaggaggtgagatagcccaccgagacgatgccaaccacctgattttttgcattaataatcggcgctttgctgcgcagcgacacgccgattccaccctgtctaatcgagataatggttttgcccgccagcacttcggcgttgtcgcccccaaccatcggatgattgacgctctgcggctgactcgagtggtagagatgaatctcgtggctgtcgccaattacgatatagctggcgtcgctgtgctggctcagcggggtaataagacgcgagatgccagccgtatcctttgcctcgaccagcgctggcaggttggggatcagcgcaatctcgctggcctgaaccttggctcgattgcctaagtcgcggtgcatctgtcggtcaacaacgtgaaacagaaatgcaccgagcaccatcaggagcacgcaggaaaaggccaccaggcagaggaataattttatttgaaaactgaacttcgcgcgcatctgcctgactcgatattttaggggaacgggtctttttactaaaaaaacaggaatgattatacgattattaacattaactccataaaaaccataagaacctttaacactgcggttttaatttgaatactgtcacagctccgcaggtcgccgatttctatcctctctttctaagaccaacaagaatgaagaaagaggaccttgttatgagcacaacagacgattcctacattgtcgtaaaggaaaaagatcccgtggcaaaggagctcgccgctgcccgccaattggtgagtcaaaccgccctgcgcgacaaatggtggcgcgtgctggacaactacaaggtcggtatcatcccactgccgttctttcttcttgccggcgtactcattctgctcgactgcctgagcggtaaactgccgagcgacatcgtggtaatggtcgcgacgctggcgttcttcggctttgcctgcggagaatttggcaaacgtctgccgctactcggtaaactcggtgcagccgcgatttgcgccacctttatcccttccgcgatggtgcactacggcctgctgcccgacgttgtcgtcgagtcaaccaccaagttctataaatcaaccaatatcctctacctttatatctgctgcattatcgtgggtagcatcatgagcatgaaccgccaggcgctgatccagggcttcttgcggatctttgtgccgatgctgtgcggtgaaatcgtcggcatgctggtgggaatgggcgtgggtatggcgatggggttgccgccgttccagatcttcttcttcctgatcctgcctatcatggccggggcgtgggtgaggggcgatcccactgtcgatgggttatgcggcgctgctgcacatggagcagggtgtcgcgctcggcaagatcctgccgatagtgatgctcggcggcctgacggccatcgtgctcgccgggatcctcaaccagctgggtaaacgttttccgcatctgaccggtgaaggttctctgatgccagccaaaaaaggcgcgattgccaacggtaacgacgagtttgagggaacgccgggcatcaacgcactggcctgcggtgcgctgttggcgattctgctgtacatggtggggatgctcggtcagcgtctgattggcctgcctgcgccggtcggcatgctgtttgcggcggtggcagtcaagctgatgcacggggtgtcaccgaccattcagcacggctcgatggcggtctataaattcttccgcacagcggtgacctatccgattctgtttgccgtaggcgtggcgattaccccttggcaggaactgatggatgccttcacgattcagaatctggtggttatcatctcgacggtgtgcgcgctggtgggcaccggtttcatcgtcggtaaaaagattggcatgcatcctatcgacgtggctatcgtctcctgctgccagagcgggcagggcggcaccggcgacgtggcgatcctgacctcgggcaaccgtatgacgctgatgccgttcgcgcagattgcgacccgtatcggcggtgccatcaacgtctccgtgggtctgctggtgctggccaagttcttctcctgacccttaacggtccatctccgattgttgtcggacgtggaccgcgcctcatgccaccaccaatttcaaatatttcatcaccaaagcgggaaggaataacgccgcctaaagatatgtcgcataactgcgtggtgcccgggcgtaccggtaatcatctgatcgacgaaaagggcaatcaggtaacctaccgcggtaaggcctatcgggccgcgtactggacccgaggaggcttttttatgaggctaactgagaagacgagaattagaaatcccagtcatcgtcttcggtattgaccgctttaccaataacgtaagaagagccggaacctgagaagaagtcgtggttttcatcggcgtttggcgataatgccgacagaattgccgggttaacttccgccatgctggctgggaacagcgcctcgtaacccaagttcatcagcgctttattagcgttgtaatgcaggaatttcttaacgtcctcgctccaacccacaccgtcatacagctcttcggtatagcgaatttcgttgtcatacaggtcctgaatcaggtcaaacgcctgatccttaacctgcctttgacgctcctcgctctcaagtttcaacgcctgttggaatttgtagccaatgtagtaaccgtgcaccgcttcgtcacgaatgatcagacgaatcaggtcggcggtgttggtcagcttggcgcggctcgaccagtacattggcagatagaagcctgaatagaacaggaatgactccaggaacacgctggcgactttcttcatcaacggatcttcgccgttgtagtaagagaggataatcgcggccttgttttgcagcgcaacgttttcctcactccagcgataagcgtcgtcaacgtccgaagtcatgcacagcgtcgagaaaatcgaactgtaggagcgtgcgtgcaccgcctccatgaagcagatattcgagtaaaccgcctcctcatgcggggtgacggcgtctttcatcagcgtgggcgcgccgacaatgttctgcaccgtatcgagcagcgtcaggccggtgaacacgcgaattgtcagctgcttctctttggcgctcagcgtcgcccaggaaggaatgtcgttggataatgggaccttttccggcagccagaaattggaggtcagacggttccacacctcgagatctttgtcgtcctggatcttgttccagttaatggctttgctgattggctgtgccggcagcagttgtttaaccgagctcatgcgatttccttaaatttgttcccgttaaagcgtgcaagacacacagccctgaacttcggtaccttccagcgccatctggcgcagacggatgtaatagatagtcttgatgcccttacgccaggcgtagatttgcgccttgttgatgtcgcgcgtggtggcggtatcgcggaagaacagtgtcagcgacaggccctgatccacgtgctgcgtggcttcggcgtaggtatcgataatcttctcgggaccaatctcgtaggcgtcctgatagtattccagattgtcattggtcataaacgcggctggatagtaaacgcggccgattttgccctctttacggatttctacccgtgagacaatcgggtgaatacttgaggtcgagttattaatgtaagagatagaaccggtcggcggcaccgcctgcaggttctggttgtacaggccatgcgccatcactgattctttcagcgccgtccactcggcaacgcccggcacggcaatgcctgcgtcgtcaaacagctggcgtacgcgttcggttttcggatgccagatgtcctgcaaatacttgtcaaaatagccgccgctggcgtaggtggagtcttcaaagcctttaaacgtctggccgcgttcgatggccaagaggtttgaagcccgcaccgcgtgataggctacggtatagaaatagaggttggtgaagtccagcgcttctggcgaaccataatagatgcgttcacgcgccagatagccgtgcaggttcatctgaccgagaccgatggcgtgagagtcattgttgccttgttctaccgacggcaccgaacggatgttgctcatatcggacacggcagtcagcgcgcgaatcgacatttcaaccgtttggcccagatccggtgagtccatcgcggcggcgatattcagtgagccgaggttgcaggagatgtccttgccgattttctcgtaggacaagtcttcgccgtacaccgtcgccgagttgacctgcaagatttccgagcacaggttgctcatgttgatgcggcccttgatagggttggcgcggttcaccgtatcctcgaacatcatataagggtagccggattcaaactgaatctcagccaacacctggaagaactcgcgggcgttgattttggttttatggatgcgcttgtcgttgaccatttcgcgatacttctcgctgatgctgatttcagacatcggcacaccgtaaaccttctcgacgtgatacggcgagaacagatacatgtcttcgttgtttttcgccagctcgaaggtgatatccggaataaccacgccgagagacagcgtttttatgcggatcttctcgtcggcgttttcgcgcttggtgtcgaggaaacgcagaatgtccgggtggtgcgcgttgagatagaccgcgccggccccctgacgtgcacccagctgattagcataggagaaggcgtcttccagcatcttcataatcgggatcaccccgatgactgattttcgatacgcttgataggcgcaccgacctcacggatgttggtcagcataaaggccacgccaccgccgcgttttgacagctgcagggcagagtttaccgagcggccaatcgactccatgttgtcttcgatacgcagcaggaagcacgagaccagttcaccgcgctgtttcttgccgcagttaaggaaggtcggtgtcgcaggctggaaacggccgctgatgatttcgtcgaccagatggctggcgagcttgatatcaccctgagccagcgtcatggcgaccagacaaacgcggtcttcgtagcgttcaaggtagcgcttgccgtcaaaggttttcagcgtgtagctggtgtaatacttgaatgcgcccaggaaagtctggaagcggaattttttagcgtaagcctgtttaaacagacgcttggtcgattcaaagtcgtattgatcgaggacttcagcgtcgtaatagccttcttcgaccagataacgcagcttctccgccagattgtggaagaacaccgtgttctgattcacatgctgaagaaaatactgacgtgcggccagtctgtctttgtcgaactgaattttaccttcggtatcgaacagatttaacatcgcgttaagcgcgtgatagtccggtgtgccgacgcccggatcggtgattgctagttctgtcgctgccaaaattcagttactccctgcttgacctttgcaacgtcgtccggtgtgcccagcagctcaaagcgataaaggtaggggaccttacacttctgcgagacgatttcaccggcaatgcagtacgctgcgccgaaattagtgttacccgcggcaataacgccgcgaatgagtgaacgattgtgttcgtcgttgaggaagtggatcacctgtctgggactgccccgaccgctgttccgccgccatagctggggaccagcaaaatgtaggggcaatccattcgcagtttttcgccttgaggtgcaatcggtattctgactgcgggcaaacccagtttgccgacaaagcggtgggtgttttccgacttgctcgaaaaatacaccagacagctcatggcctgcctcagtgtgtttcttgcagttggcgcagcgcggtgattttatcaggacggaaacctgaccagtggtcatcaccggcgacaatgacgggaacttgctgataacccagcgcacgaacctgacctaatgcctgagcgtcctgcgttaaatcgacaacttggtaatcaatgccatgtttgtccatagcacggtaagtggcgttgcattgcacgcagtctggcttgctgtaaatgattatgctcatgattcgcatttacctttagggtaagatgactgaaacgtttacggcttatattccgcgtatcttgcaggagataagccgtaagatgagtatcgaagggttatccgtattcgatgaaaagaatactagatgtagtggctgtatttatcaacccgcctagatataggctttttgcatgattgattaccgaacatacggaaaaggccgacaggccgcgtggaatcaggcttagctttttttcgattttttaaagaatttttgtaaaggtgaaatcgctcacatattaagctgattgtctttgccgcaataaaaaaacgccccaatgcggcatcacctgcattggggcgttttaacgcgaaagattattttggcgtggtcgaaaggccttatttacggcccagtaaaacccctaagacgatacccacggcggcaccgactccgacaccgtgccatggattctctttcacataatcggtggcctggctggcagcgtctcgagcgtgctgggtcaaatttgtgttgccgttaaagcgggaacgggcatcgcgtaatacgccttctgccttgccgcgaattttctccagctcttccttggtttttgaattaccggatttcaatacttcatccaaggtgtcagccagcaaagtaatatcttcatcggcattacgttcaaatttctctgttttcttaaacattaagctctccttgttatgaactcttttattttgaagcctggttttaagacttgaattaagcatagcccaatataatgccctgtgaccgatatcacgtgtatctgagtgtttaatgcgcaatctgaagatgaaaatcagcttttttgtaccttgcgcagtgtgattttcttcagggctggcgcgggattgcagcctataactcagatttatctgcaaaaaagcggccggtgtgacaattgatgacatttttaaaacgtattttcatttgcagggcggaaaaacctgtttatgctgtgaattcctcaaaactgtgatcaccatccaggccagtcaatgtcacccactaagttccaaactaatttacagttgaataaacgcatactgtcgatagttatttttactttcgtttgctatttgagtatcggtttaccgctcgcggtattgcccggattcgtacacggcaaacttggctttaattcggttctcgcgggcctgattatcagcgtgcaatatttcgcgaccctggccagccgacctcatgcagggcgttacgctgaccacattggtcccaagaaagtggttatttttggcctttcctgctgcggaataagtggcttaatgtacgtattcgcctcgttaaccaccgctacaccgatgctgagcctgattctgctctgcgtgggccgcgtatttctgggcgtaggggagagctttgccgccaccggcactatcctatggggcatcggcgcaaccaatccgattcataccggacgcgtgatttcgtggaacggcgtggccacctacggcgcgatggcggcgggcgcgcccttaggcgtcttccttaacgcgcactggggcctggtggggtcgccgtcactatcctgattattgccgcgttggcgattgcgctggcgagcaccaagccggccattactgtcgtcaccggtaaacgtctggcgtttcgtaccgtggtcggcaaaatttggatgcacggcctgggattaggcttcggcaccatcggcttcggggtaatcgcgacctttatcaccctctattatgccgacaaaggctggtcgggcgcggcgtttacgctgaccgtcttcagtcttggattcgtgggtatgcgcttgatcttcgggagcaatattgctcgtttcggcggcctgaaagtctccgtggtgtcgtttgtgattgaaatcattggcctgctgatgatttggcacgggcacagcccgttcagcgttgaaattggcgcgttcctgaccggttctggcttctcgctagtgtttcctgcgctcggcgtcgaggcggtgaaacaggtgcctcagcagaatcagggcacggcgttaggaacctactcagcgtttctggatctcgggctgggcattaccggcccggttgccggactggttatttcacatttcggtaccccgtctatctatctcgctgccgcctttatggtcctgctggcgatgcttattacgctgaagatgatgcgtgatgcgcaaatgcaaaatgacggtcaataagttaaatctaaaaagacggtaatttgttaaacattcccggcaggaaggtgagatcctgccgggaaaagcttagataaatcctaaattcccctcattaagacgtaaatgcattgtttggcaggtttattgcggtaaggtcgctttgcagttttgagagcgaggataaaccatgtatttacggcccgacgaagtggcaaaagttttagaaacatcaggatttgaacgggattttgtcgacgataaagcctatggctatcgccgtgggatcattacgtttacgtaaaccgcgaagcacgttttggtcgcacggcgctggtgattcatccggcgatgaaggagcgcagcgaacgctttgccgaaccgaccgcgtcgtttcgcagcagcggtgtctacacccagtttcctctcgatcttgagagcgaagtgaccgcgtactacggcatctgccacggctttagctcacgccagttgctcgccaattatctggacaacgttttcagataatcggttttgtcccttccccaacgtcttgggggaagcagaccaggccgtctagctacaccagatgcagttggttgaaggtctcattgtagctgcggcgaaactgtgccagctcgaaaggctcgatatcaagctccgagaagtaaaacagcgccagctccgcgtgttcgctggtcagcaccggatcgagatgcgcgcgcaccagcacgttacgccagtgggcaatgttttcgtccgaggcatctttgataaacgtgtgatagataaaaacaatatacgccgccttacgaatttcttccgcgtagccccgctaatcgagcgaataaacatcgcactctgacgtttacccatctccagtagcattgaatcaatatataccggcttgatttttaacaggctggccagcgagtcattggcctttcgcgtatccgcggtcatgaaccagtatcccaccacaaaaacgacaaccagtgcagcaatcataatccatatcattcttgacttgggcctccggccttagtgcgtaatgccaatgagtttatagggttactgcacattatcaactgcaaaaagttgttgaaactgatagcttcatattgcagtgatagactgagttattccccgctgtttatggagtttgccatggctcgtaatgttgaaatcaaagcacggattgatgatttttctgcgctgtacgccaagatagcgctgctggccgacggtgtgccagagcttatcgaccaggatgacactttctttgtttgtccgcacggccgcctcaagctgcgcaagctggggcccgacagcggtgagctgattttttacaagcgcgccgatcgtgcgggtccgaaaaccagtttctattcgctttctgaaacacaggaccctgacgggcttcgtgaaacgttgacgctggcctacggcagcgccggtcgggtgataaaacagcgtacgctgttcatggtcgggcagacccggctgcatctggatcgcgtcaagcatctcggcgactatctcgagtttgaagtcgtactcgaagaccatgagaccgaagagcaggggattgccatcgccgaagatttactcgaacgactcgatattcagcgtcaggagctggtagatcaagcctacgtcgatttgctccgcaaacagcaacacccgcgctgagtcgtcttaatcaagccgtttactttctaaatattttcttaagagcctattttatgtccgttaaacgccgttttaagcaggtcgatgtttttaccgccgagcccctgaagggtaatccgctggccgttgttcttgatgccgagggcttgagcgacgcgcagttgcaggcctttgcccgctggacaaatttgtcggagacgaccttcgccttgccgcctaccgacccgcgcgccgattaccgcgtgcgcattttcacccccgataccgagttcccgttcgccggccacccgacgctggggacggcgcacgcgctgctggagtctggtttggtccctaaaacgccgggtacgctgattcaggagtgcggcgtcggcctggtttccgttaagcttcttcctgagggcggactggcgtttgccgcgccgagcgccgagatttcagtattgcccgcgtcgctctattcgctgcttgatgacgccatgcagcatggcggtcgccagactaacgttgacgcctgggtcgtcacgatgggcatcagctggttggtggtcagaatgcctgacgccgaagcctgtttgcgggttaaggccgacatcgacgcacttgccgcactgcaaaagcaggctggcgtaaatggcctggcaatttatggtccgcatccgccaggggcagcggtagactatgaagtaagagctttgctggttgagcaaaaccagctggtggaagacccggttactggcagcgccaatgcctgtctggcgcgcgtacttcagcagcttaacttcccggacggcggcgagacctcgaagcattaccgcgttcgtcagggcacgcagcgtcaccgcgatggtcgagtttttgtgcgctatgagcagcagcaaccgtggattggcggtgaaacagtcaccctcatcgacggcagtatcaggctgtaaaacgctatttccccggccaccactgcaccaatgactggctggggcttatgtcgtaatgcgccttgcccaacaggtgattgatgatttttgccgagcgccaggcggtgagcgtcaactggccctcggcgctgccgtggctgtggatcccggcattgaccgcataaatacggtgagtatccggtccgttccagcgaagattaaaattcgcctccagcggcagatgctgctccccatcgtaagggattctctccaatagcggtttgagatactcgggcagtccgggacgatagccggtggctaaaatcacgatgtcagcctcaaaatgctcatcgcattggctcagcccatgctcagccttcaactcaaagcggtcctcggcgcggcggatgacgcttttcaaggcacgatgcggcaacagggagacgttgcgcggttgttgcagcacatcaaacttgtgataaagatgctgatagattttctccagcgtatggtagctgatgccgtccgacggcagtttctgcgtccttatctcctgttggcgaacctcttccggcagagtataaaaatagtttacgtattccggggtgaagtactcattggtaaagattgattcgtccagcggctgaaaattggggcgacgcgacagccagctcaggtttgccggttctccccagtggccgtcgagcgtgttgagcattacgtcagcgccgctttggccgccgccgacgatgatcacccttttgccggtaaagtccggctccagcagggcgatttctgccgcgtgaaagcaatttttccccagcgccgactgcgccgctttcggcacccagggggcgtgaccggtgcctaaacagatatgctgtgactggaattttccttgcgaagtctgtacctcaaaacacccctcgctgtcgttaaaatcaatctgctctaccgggtgtgagaagtgcagatttggcatcttatcgcatgcccatcgcagataatctgaaaactcgtcgcggctaatgattaactgctcggttgccagaaaacgataaatttttttgcgctcgaccagatagttgatgaacgagaattcactgcgcggagagaccgtggtgactaaatcctgcaaaacataagtctgcatcgtggccgtgggcagcagcatgccgggatgccagccaaattcgctattggcatcgaaaaaagcgctacgtatcaggccactgtcctttgccatcgctgccagactgagattgaaagggccaataccgaccccaataagatcaagagtcatatccgttgctcgctgattaaggtctattaatcatagacgatagaaatcggctttttgccccgtgcgctatggctggttactttttagaatattaataaatgactgcatcatcggcgaagattgaagattatagcgatacagcagccaggtgcggtttttcaccggttggccctcgagggtaatggggcgacgatacaggctgtcaggtaatgggagatagcttgaaataatcgcgtagcccagcccatgggtgaccataccgagacaaacctcaagtttatcaacggtcatcgcaatattcggtgcgtgagaaaaattggcgttccaccagcgttcgagcaactgtgtgacgtgctggccgtgaacaatgcgaatctgcggcaggtggggcaatagtgcaaaatcaaagtcttgctggccgatcagcagatagtcgtcctcatcaatcagttccttgccttctttccagtggtagtcatctttaacgatggcgatatcaatctcgccgcgctgcaacagcgtgaaaatctcctcgctcaggccgctcatcagattgatacgaatcccgggatgcgactgccgaaaacggctcaacagcggcggcaggcgataagcggcgtagttgctcgacacgccaatggctatttcaccctgttgcgccatctccagactgtgcagattctccttgagctgctgtaggtcgcgtaacaccttctgtgcgtgctgcgccagatattcaccctgtgcgctgaacaccagacctttatggccctcttcaaacagccgaatctcaagcttgcgctcgatctgtttaagccgataactcagggccggttgcgaggtgtaaagctgctctgcggcgcgggtaatatttttgtgctgatagacgctgtgaataatgagccagtctttttcattcacgattgataccgccgtttattcaagccataaaagaatttttgcatgaaaggggcgtgagataaaaacacttaattggacggcaggcagaaaatcccctatttctgatgtttaccgctaatcacgccacaaaggccgccagattaagcctatatcaggaattactctgcaccagctcagggaaatatcatgtcggaatgcaccaaaatagaacaaaagaataaaattatttataccctcgataaccttgctccccggttaaagcagctcgctctgcatattcatgccaatcctgaactgagttttgaggaggtcgcttctgcggcagcgcttattgctccgctgcgcgaggcggggtttgagattgaggaagggctggggggctgcctactgcctttcgcgccaccttcgacagcggcaaacccggcccgactattgcactactggcggagtatgacgcgctggcagacctcggccacgcatgtggtcataatctgatcgggaccgcatcgatagccgctgcgctggcgctaaagaccggttttcctgagcttagcgggcgtatcgaggtcataggtaccccggccgaggaagagggcggcggtaaaattatcctggccgagaaggggtttttcgaccaccacgacgcggcgatgatgttccatccacgcgacaagaccatggtagtacgtggaggactggcctgcgtcgatgcggtgttcaaattttacggcaaggcggcgcacgcggcgtcagcgccacaaaacggcattagtgcgcttgatgcggtgatccacacctttgtcggcattaacgccctgcgccagctgtttaccgacgacgtgcgcgtgcacggcattattacccacggcggcagcgccaccaatatcgttcccgcctatgccgaagccaaattcctgctgcgcgccaatacggtaaaaggcctacgcactgtacgtgacaaagtctttgcggcggcgcagggcgcggccgatatgagcggtgcgcgcctcgaaatcgaagaggggctgacctatgccgaacgtaacaacaacctcacgttggccgagtttttcaggcagaaccttgacgcgctgggcattgaggtggttccgcctccgcgcagcggcggtataggctcgtcggatatcggcaacgtgagccagataacggcggctatccacccttatctgcgcatcggtgacgtcatgccgcatacgccggagtttgccgaggccgccggttccgaggcgggtctggcggcgatgctcaacgcagccaaggcgctggcgatgacggcagttgacctgatcgagagcccagaaatgctgcgcgcggtcagggaggagttcctgagctggaaggcgcagaactgaatctagacgcttttgcatcacccaatgcctgaataaacaaataacaacaagacatcacaatagacaggaagtgaatcaatgaacaagatgacgaaaagcatgctgacgctggccctgatggggctgacgctttccgccggtgctgcccacgccgaggagacgctgcgcgttgcggccgacctgagctatccgcctttccagttccgcgatgcaaaagggacgccgagcggctacgaaattgatgtcaccaacgccatttgcaaagagatgcaggtgaaatgcgactatgtggtgaccagttttgacgccgaaattccttcgctgatcgccaaaaaagtcgatttcatttcgccgcagggggcgacggataaacgccgtaaagttattgatttcagcgattttgtttatcacattcccaccaagctcgtggtacagaaaggcagtccgctgttgccgaccgccgagtcgcttaaaggtaaacgcgtggcggtgcagcaaggttcgattcaggaaatgtatgccaacgcctactggctgccgaagggcgtcgacgtagtgccctatgcggatcaggatactatctatcaggatctgacggcgggtcgtctcgacgcggcgctgagcccggcggtggcggttacctacggtttcctcaataagccgcagggtaaagattttaccctgaccgggcctgaggtgcgggacgataagttgtttagcgtaggatcgtccttcggcgtccgcaaaggcgatgacaaaacgaaagcgctgctcgatcaggggctggcgaagatcgttgccgacggcacctgggacaagatccgcgtgaagtactttggtgacctggatattgcggtgcatcaggcatcaggcgcgaaataatggcctttacgccccggaatatgaccaactgatgccggtgatggatgacctgctgctggctttttcgcagctgcatcgtctgtccggcagcgaagatgctgagcgttctgccacgctgttggtggatcaacttcagtcgcacggcctgaatgcgcgtattgaacacattccactgttgctgagcgatccgctgtccggtcggctggcgctgcccgaattcccggaatggcattgccgggccaagacgcgttctttttccgcacactgcccgcagggagtgagtgcggcgctattttacgatgccgactcaacccgtgcgcgttccgacagggagtggcagcggtgggccgaacaggtcaggggcaagattgtcattgccgatcaggggtttgaggattacgttcagcgcctggatgcggcgcaggccgttgggttggtgcatatctggggatcgaccgaaaacgcgttgcacgaagagacggtggggcctatctggggcacaccgaccccggatgaccagcagcgctatccgcgcctgccggtgatttcgattaattatcacgacggtcagaacctgctcgggctatgcaatctggtgaccacaccggttcacgccgttttaagcaccgaggtacaacggcaggtgaaaacatgcagtctgccgctggtcgagattgccgggcagagtccggaatttgtgctgctctcttcacattatgactcgtggcatgagggggtcaccgacaatgccaccggtaatgcgctctgtttggcgatggcgctgcattttaaaccgcaagcggcaatgctgcggcgcggcctgcgcatcgcgtggtggccggggcattctaacgcccgctacggcggctcaacctggtatgccgataactatcgacaacagctcggccagcactgcgtggcacacatcaacgtagattcaccgggctgtaaagacgcggttcaggtggtcatcaatgccagcggcgcggagtcgcaagcctttctaaatcaggcggtcgaggcggttaccgacaggcctgcgcgatggattgcgccattgggcaaaggcggtgaccagtcattctggggcagcggtgtaccgctgcatttcgcgctgcgcgaagtgccactcgaaaaaaccagccattcacccggcagcggcggcggctggtggtggcacaccgagcacgacggctatgataaggtcgatttaacccttctttggcgcgactgcctgatccacgtgcgttggctggaggtattacttcatgaggcgatattgcctctagacgtgaccgactatctcgccaaaatggcgttggcgctcaatgcgcttagccagcgggtggatgctcgctttgccttgggggaaatcgaaaagagtttgctggcgctgagcgaacctgtcgcaagacttacgcagcgggcaagcgaagaaccgacgcgctggcagccgttgctgagccgcgtcgtgggtgatttacatcgtctgcgctacagctcgaccgatgattttcactatgatctcagctatcgcggcggcgcatttcccggcttccaggaactggcggcggatttatcgcaaactacgcctgaaagcggactcatgatgatgactcagtatcgtcgccagcgtgaccgtgcgatgtggctgctgcgaaaggtccaccaggcgctggctgaaatagacccatgactcagacgacctgccgataggccagcaccttgaccatgtaaacgctcagcggatcgtactgatagtcaccgaaacattcggtcagggtgaagccgcatttctgataaaggccgatggcggcatggtgatcgacgccggtttcaagatacaggcttggcagttcaagctgtcgggcctgagattcaacggcatccatcagtcgctcagcgatgcgttgcccgcgatagtcaggattgacgtagacgcgtttcacttccgccagaccgttggcacaaataaacaaacaggcacagccgacggcgacaccgtcaatttcggcgataaacggatagtgctcaaaggcggccatctgatcgagtggcatactgtagtcgctttccgccggataaagcacgctctgataggcatcaagctggctgaccaaggcgataaaacgggcatcaagcaccgtagtaagactgataatggatactggcatttccttatccttgattaatcaccaataaatagcggcaggcttcagaccccacgttatcaaaagtgacggctaaatcaacgccaaacgtcagcacgtctccggtcgctaattcatagcgactctcgccgtagtcaatggccaactgcccctcaatcagccacagccgctgccgataggcgcggtttccccagcttggataactgactctggccccggcgggcagcgtgatttcaatcaactcaatcccgctcgacggttcgggcggcaaaacctggcggcgaagatagccaatgtccgggtcgcgccagatttcctgctgcttgaggcgacgcagatttttagcttcggcgttttcctctgacagcagttgggtgacggaaattcccagaccggctgccagcctgccgagaaccgtcgcactcggactactttcctgacgctcaatcttggaaatcatcgccttgctgacctcagaaagcgcggccagctgttcgagactcaggccttttcctttgcgtaacgcctgcagacggccggcaattatttcatcgattgacattttatgtttctctgtgtttacttttgtagaattaattctactatattggaattgaaagccacaaggggacaatcatgaatttgatcgaatgcaccgaacagcagcacgccgtcgcaatactagagattttcaatgaggcaatccttaactcaaccgcgctgtacgactacaaaccccgggcgctggaaagcatgtggccgtggttcgccgcgaagcgcaacggtaattttccggtcatcggcctggaggacactgacggcaagctgctcggttttgccagctatgggaccttccgcgcatggccggcctacaaatattccgtcgagcactctatttatattcacccagaacatcgcgggcaagggctgggcaaaatattgctcaatgccattatcggcgaggcgaaacgccgtgaggtgcacacgctaattggtgggattgatgccaccaatcaggccagtattgccctgcataccaaggccggattcgtcgaggcaggcatcatcagacaggcggcctacaagttcgataactggttggatttagccttctaccagcttattctggcgacaccggcgcatccgctggcggaatgaaaaagcaagccgcagagtgttcagcgtcgttaagggggtaaggttgggttattctatccgatgagtgagactgaccatgaaacgtgatgataaaaatattcgcttagccgatgctgacgcctgctggcaggcgattgtcggccgtgacgctgcggccgatgggcagtttgtttatgccgtcaggactacgggaatttactgtgcgccgtcctgtccgtcgcgccagcctaatcgtgaaaatgtcgagttttttgccgcggccaagcaggcggaggccgccggttatcgcccctgcaagcgttgccgtcaggggcgtatttccctgcgccaacagcagattcagcaggttgagcaggcctgccgcctgcttgagtccagtgaaaaaacgcccactctcgaggctctggcccgagaggttgggctgagcgcctaccattttcatcgcgtgtttaagtcccacaccggcctgacgccgcgcgcctatgcagtggcgaaaaggcagcagcgggtacgggaaaaattggttgaaactcagtcggtcacctcggctattcttgaggccggatatgcctcgaacggtaacttctacgctagctcgggtgcaagtctgggcatgacgccaagcgcttatcgcgccggggtaaaggcactgcggtctggtttgccgtcgggcgttgctcgctgggcgatatcctggttgccgaaagtccgcgcgggatctgcgcaatcctgcttggcgataacccgcaaaggctggtagaaagcctacaggataattttccacacgccacgttgctcggcaatgatgaggatttcgaaaaacgtatcgcaaccgtggtggggtttgttgacagtccgcaaagcgaactggcgctgccgctggatattcgcggtaccgcttttcaacagcgggtgtggcatgcgctgagggctatcccggtaggtgaaacgctcagctattccgaggtggcggaaaaaatcggttcgcctcgtgccgtacgagcggtggccggcgcctgtgccgccaatcttttagcggtcgccattccttgtcatcgggtcgtgaagaacaacggcaatatttccggatatcgctggggcgtagagcgaaaaaaacgcctgctggagaaagagcaacggcctgagcggctcaagactcgttagcgaggcgcattgttctaaattgactcagttatttttcagatttactcagctttaggtttaggcatgaaggcttcaagcttttgcttttgcaggccttcagtcgtgaagttatctgcgcttagccactgcctgaacgccgcaccgataggcggccattcgccgtcaatgattgaataccagcaggtatcgcggttgttgcctttggtgataagcgcctgacgaaacgtcccttcgaacgtgaagccaaaacgtttggccgaggcgttagaggcatcgttcaggctgttgcatttccactcacagcggcgataccccagcgtatcaaacagatagcttagcagcaggtagatagcctcggtgccgaaacgcgagcgtttcatcagcggggaccagttgacccagccaatttccgccacgccgtttaccgcatcaatacgcattaatgacacaccgccgatcgcgtcgccggtggcgttatcaatcaccgcgaaatagagcggatccttcaggctggagatcttggtaatgtaggtgtcgcactctttctggctagcagggcgattgatcgagaaataggtccagtctcggtcatcatcaatgctgtgccaggcgttaaacagagatttgctgtgcttgccaacgtccagtggctcaagatgacaatagcttccttgcagcgtaataggctctggaagagggcgcgtttgccagccggggatctcgtcaccgatcggttgtccaaaatgatttaatgttgtcatcttattttccgtagtgcctgaagggattgtgaactaaccctcataaaatcagaagttttcatttgtcgcaaccgattaacaaaaaggttaatcatcacgctatttcgtttcctaaccgcgagcgggttggttaaagtggaagcaactgattttttcctgattaattcctgagggctccaatgcaaccactcgacaagattgtaaacctcgctgcaaatcccattctggacgctaattttctggcgcagtgcaagcaaacgctggatgaaaagggggcgctggttttgaaccagttcctcacccctgcggcacttgccgcgattaaacaggaaggggatgaaaatcggcatttggcgtattacacccgcagcaatcataacgtctatctgctgaaacctgacgacagcctgccggcgacgcatccaaggaaccgccagattgtctcctctaaaggctgcattactgacgaggaaattcctcaggcatcggcgctgcgtgcgctttacgatgcgccggaattccgtgcttttctgtgcgccgtgctgggcgaagaacgactgtatccgtatgccgacacgctctcatccattaatctgcactatgccagcgccggtcaggagttgggctggcattttgataactcctcgtttgctattacgctgctggtacagaaaccgcaggcgggcggagtgtttgaatacgttgagaatttacgcgatgcagacggcggcgatatgaactattccgccgtggaacagctgctggataaagctatcgagccgaaaaaactgggcatcgaagcgggagatttagtgctgtttcgcgggcgtaatgcgattcaccgcgtgacgccgaccgaaggcgaggtaacccgaatgctggcggtgctggcctataattcacagcccgatatttcactttctgaaacggcgcgtatgaccttctacggacgcgtataaacgcattgcccaagctgctctcagtctgggcaatgcgcaaagtattaaagagatgccaacgcgctaaaggcgcgattaaagatttgctgggtgcgcagatgtaccaactgctgccagtctttatcctgcggataaaatccttcaaacagctcacccttgattttcttgccctgcggactctgcggatcgccatacagatgcagccagtggtcgtcgcggaccagatgatgcatggtttcaccgtcataggtgccgcactcgaccaccagttgaatcagctgagtatcgggtaagttgtcgagcataaactgagacaggtagccggttgccgtcgccgttacgccggtattactgccaatattcttgccggttatcagcacatacagccaggggccaaacacctcacgcgccggttgcagcgaaggataagctttttcggcaatcgccatcaacatcgggtgaccataggctcccgcgccggtatgcagatcaaaactgactatcgctttggcatgtgccaaatgtgtttgaatgatggtaagcagcgtgcggttagaccagctcggctgctggccgccgaaaaagatcccgtcagcatgggtgtattgacccgcctcgacgatttttttgatctcactccagcctgactcctgcgagtacttgtccatcaggtcgtcggcggcggcgcgctcagggccgtttaagtctttactcagataaatatcatgcagatcttcatagcgggcattcaccggcagcggcttactaaagtcgataaagttgcggttaagatccatgttgtcttcattgacccgcctcaggtgcgcagtgccccacggattgagcaggtggatcatgaccacggcggtatcggcgggcaacgtattagcgtgattcacggccagccagtcaatctgacattcggatccgtagtaaccttccacgccgtgcgtgcctgataccaccacgaacagtcgcgaagactgtgggttgccaagcaccgccacgtcggtagctaacgcttctcccttggggcctttcaggggatgaggatactgcgtgagtttagcgcctgcttgtctggcagcggcgaggaagcgctcacgctgcaccgtaaaatcaggcaattgagagtaaccctgcagcatccttatctccttgtttaagactgtgcgaaccggccgtattacgacggccagcgatgattatggctgtttattatagacttcaaagctgaagtatttttttgagatcttatcgaaggtgccgtctttatggatagccgccagcgccttgttgatcatctcctgatgttctttatcgcctttacgcaggccgattgccgtaccggcccccagataacgtgggtcattcagcatctcaccgctgaaggcgaaatctttaccggctgcagtatcgaggaagcccgactgcgccgcggcggcgttggtcagcgtggcatcgacacggccggattcaagatcctgattcaccaaatcctgattttgataagacacgacgttcacgcctttgctctgccacagcgcctgcgcataggcttcctgaatggtgccctgcgcgacgccgatacttttaccttttagcgattccggggtaggcattagtccgctgcctttcctggctaccagcacgctcggaatgtggtagagcatgtcggaaaaatcaacctgtgcctgacgctttggtgtcaccgacatggcagagagaacggcatcgaattttttggcgtttagggccggaataatgctgtcaaagccggtttcgacccactggcatttcaccttcagttgctggcaaatggcgttaccaaggtcaacgtcgaaaccgaccaggctgccgttgggcgctttagtttcaaaaggcgcaaacgtaggatctacaccgaagcgcaggactgagtcggcattcgccagagagctaaacgaggccagagccagtagggtgaacaacgcgcttttcttcatcatagtttcctcagggtagattgacggcctttctcagcaagttacagcaagatgcgtaccatctttataaattattaacgagaatacctgagtaacccaggtaacagaacacagggaataaaaacagtttattgcaccatctcaaggtgatagaactgggtaaatatagggtttacaccaaaatgcagggcgggtttatctgacggcagagggggaaaaatgaagatcagagtcgcgaataaaggggatgctcaaggattatggcggctgcgcaacgcggcgcttaggtacggatgcgtccaggtttatgatgaacccaccctgaaggcgtttacgcccgatatcatgccggaaggcatgaacaagacaatcgccgaaaatcaggtttttatcatagattcttcagacggaaaaaatcctgttgcctgcggttacctcgatctggtcacgggtcacgtggaggctgttttcacccagcccgagtatcaaggtaaagggctagcggcggccatcattgaacaaatcaagcagcaggccagaagcctaaacattcgccagcttacgctctcttctacgccaaacgcggtggggttttatttgcgacaagggtttagcgtggtcgccaaaggcaagtatttttctcactcgacgggtacctacctcgactgcgtcgagatgatttggctggataacgcctaggatgcgttacccagccgagtgagacttaaatcttacactgcggcagctgtgccttggtcatgacctgatggaaggtcttgatggcacaaagcttgttggggccgatattttcacagccggggagggtgattgctatgctgctcggtgggttgtttagcgtcagaacctgctgtgatcgcatctgatcccgtgtctgatagaccattttcagcgaaatatactgctggtgcgaggtgcggttctgccagcgctcaaacactaatgcgccagccggtggcgtgttgtccggctgcccgtccagtgaccagttcaggcccaacgcgcccgcgacgttttcgatattggtatcatgtccgccgagaatcaacagcttattgcccgtcgggagcgtatagccggaagccggtttctctggtgctcccagtgcgctatcaatcgcttgcaggattggcgtgccgttggacttggccaaataaggcgttcctgacatcagactaaattgcagattgtgcagcgccatcaagccttgccaggttttttggtctttgatatttccccacgcggggtcggtcataccctgtgcatcctgtaacaggaagatttcagccagcgtagaagaaaggccaattgcgcccttaagcgatgcgtcggtaccattttccttcaccttgaccgatgacggcatattgatgcccagttcgcactgctggccttttttctgcatcttctgacaataggcggaatgcggataatccagcacgttgctcatcagctgcagctgtggcgcataggttttgtcgagtgccgaaagagagcctcctgcctgttgctcgatagcctgctgcgccgttttctcatcgagtttgcatacttttgccttcaaggcatggaaaagaggatcggcttttttgagatctttttggaaatgggcatcgaggtggcaacccggcgcaatgccgtttaacaaagcttgggtggtcagtcgcgtgcgttggtccacgtctccccagccaaatatcgcaccgttggcagggcaagacttgtcggatattagcccttctttacgaaaatactcaccgtaatagccgcccatcaatgtgacaagatgttcacctcgcggggtcagataaccgaattttaccggccacactggccagtctttcgcggcaacctgttccattttttttgtctgtttggtcggcgcacgaacgccgtgacggcttaaaatgactgcctgctgtagctggagattttgcgtcgccggggcgtcatcggcaaaagagagtagcggaaaactcaggcctgccagcagcgcagaaacgacaagagggagggacttaaccgacatggggcttcctttttaaattgactcaactgatattgtcttaaaagaatgaggaaaacatgaggattactgaggcgttaaggctttgctcataaatattcggctcgagccctcaggtgagcaagggatctcgccaaagcgctgccagccatatttggcgtagaaattcggtgcctgaaaactgagggtgtagagcacgcctgaagtgcatccgcgtctcgccccttcctgttcaaactgtcgcagaatctccgagccgagacccgaaccgcgcagcgtgagaggtagatagaacagctcgataaacatcagcccgagagaggtacgcccgagcataccgcctagcactttaccggtctgtggatctttcaccaaaaccgccagcggttgtctatctttgatgcctgccatttcggtattgaaatcgtcgagaccgtcgccgattatcgcttttgcttcatcatcaatgacatccgtcatttgcagccgatacttttccatcaatgcctctgtcagtaaatcacgattaaatactgaaccgatgatggggagggcgtgagaaatggtcaagttaaactattgtgtagatagacaaaggggagcaaatgctcccccggtatactgaattgttcggctaattatccaaaggtaaaggcgtaagcattcacgccgccgttgaggaactcgatgctgaaggtgtgattgccgctgttgtccttctgacgaatcagttggtaaagacgttggtcggtgacaacgccttcaccgtctgcgttggtgtcgctgccgtgcatcgcgccaggggctttaccgtcgagcaagactttaaatcgtaccgctttgccgtctttgccggggcccaacaccagatgcagatcgcgagcgtggaactgataaaggattcgtcccggtgcgctgttgagctgaattttctcgtcattgattgtccagttgccatcaagcgcccaagcgtttaggtccagcgtagcaggggctttatagttaacggcaacgtcagacgcggcattatcggaggcaaaattctcggtgcgcatatagcccagataagtctcgggagaaattgagccctcaagccccggtgcttgttccacgcccttgccctgcacctgacttattgatgtatcgacatttttagcacctgcttcgcgcagcaattcttgaatgacacgctcagactgagcgtattccccttcaccaaagtgggtgtggcggatctcaccttttgcatcaataaaataatgtgcgggccaatactgattgttgaaggcgcgccagattttatagtcgttatcgatggctattggataatcgatgcccagtttttttgactctttagtgacgttgtcgatgtcgcgttcaaaggcgaactcaggagcatgtaccccaatgactaccagtccctgactgcgatatttatccgcccaggccttcacgtaaggcagcgcgcgcaggcagttgatgcaggagtaagtccaaaaatcgaccagtacaaccttgccgcgcagtgaggctgcggtaagcggcggggaatttagccactgcacggctccgtccagtgagggcatcggccccagatcggcaagagtaggcaaggcaccgttgtctgcggtggccgtcgtttcaggatttgcaggattgtttacgccaaactttttaagcagcgtttgctcgatgccgccagttgatgccgttgagattctggctaatatcccggtatccaggccaagggagatagccactacgccaagcagcattgccgcaccgatgccgcgacggatccattctcctgcgccgagggattttttcatcgccgtgaagaccttgccgccaatcaggagcgccagcgtcaatgaggtcaccgcgcctgccgcataggctaaaagcagcagcgtcgaacctacgttggcaccttgcagcgcggcgccggtgagaaccagtcctagaatcgggcctgcgcagggtgcccataggagaccggtggcgataccgagtaaaaaggaggtcccgatcttcggttttctacccacgcttagcgcatccgtcatgcggttccccgccgagactaacggatgcatcagacgctcaccgatacgaggaaatagcagcgtgataccaaaaattgccattaaaatcagggctaaccagcggccatactgattcgcctgaacgacccaacctccgccaacggccgcgagggtagcgaccagcgtaaaggtcagcgccataccggccagcagaggaagccccgtacgggcaaaggattggtcggagcgtgcaaatacgaacggcagcaccggcaagatacaggggctcgcgatagtcagcacgccaccaagataagcaaggattaggattagcatgtcattttctcgatcggaataggggtaaggtttttctctttttaccctttaagaatagcgtgttaaccggtccaataaggtgaccgcttaatgactaaattgtcatttttgattccttttcgccgcttttctcactaccggtcaaactttctgaacgcttctgcctccataggttcactcactggattgcaaagcatcagagagttaggagtgtcgtcattgcttattcttgactcgattggatgaccgcggtttaccagttgcgattcggcatgctcatgagaggactaaaaggaggtataggatccttaatggtttgagggaatggccagcgcagtgctcgataagtattccagatttcacattcttcgaacatcgacagttattggttgaaaatgttctaacttaaagttttactaacaaagttaagtaaaaccagaagttaggtctttcactgataacagagagtctcaggatgaattttttttgggttaacttaggaacgagccataaagaggtttttaaaaacaaatttctctgggcaccacaatttaccttcaacaaaaatggttcaaagattgttaatcagggctggtcttcagtcgcaaaggtcaagaagggcgatatcatttttggtcatcttgatagcaaaattgtttgcatagcgaaagcgacaaaagacgtccatccatcgcctaggcctgaaggtaaaacttttgaccagtggaatgaaaatggttggaaggtggacattgagattacaaaaatccctgagccggttagagacagtgagttttgcgatttctttattgagaagtataactctgagtgctcaccaaaggtgtttaccgttaagggtatttgttcggtcttttatatgtcatcactgccgaaaggtgctggtgcactgattttgagtcatattcaagatactaattacatcgccgatgattttgatcccaaacctcgtcccgagcctaaaataggcagcaaaatagatactgtccgcgaagctatcataaaggctagaattgggcaggggccttatagaaagaaactcatcgaactttggaatggcaagtgctctgtaaccgaactcgcttttgaagaactcctcgttgcctctcatatcgttccttggtcgctatgtgaatcctttgaacgcatagatccttacaacggtttgctgctatcgcctaacctggataagttgttcgataaggggctaattagttttaccgatgagggaaaacttttactaggcacctcgatcaccgatgaggttctcaataagctaggtatctcgaagcactcacaaatttctgctttaaagccagaaaatctgccttacctttcgagacatcgagagctgtttgaatttaagtattagtggtgatgataagttttgacggtgttgctttacccacagagccatcacgactcgatgagagggtttaatcgaagtatggcccgtcttctcttccttgcacatctgtcacaccttatcgcgagagaagtaagcggatgtgtattccctgtatcaagaaacccttccataaatgcctttgttttcagactagctctcagcctgggcctaaaaattataccaataaacaatagatagacgagttgagtaccgattgatgttcgcgacggacgagaatcgtcatttcttttttacagagctaactaacttatatattgatgcttttttgaacccgcatcctttcgtgtacaccttgaatgtggcggatttattttcgacccacaggttacgctctctcttcccgacaaagatcagtacatttagttaacggtcgttacataatttaattgcacgagttccagatgggtataatattaaattaacgaatgataactaatccacgcctggactagtgataacaaattaaccagatttgaaggaactactatgaaaaccctgactaatgtcttttcggttattgcactgactaccgcttcgtttgcaacctttgccgctaccgaagtgaactccgctccagcgggtgaatacagcgctggtacgattagtacgtcggtagacagtggtaacgtggatgcgctaaacgcaaaattagcggctaaagcaactcaagacggcgcacgttcataccgaatcatcacttccgttggtgaaaataacttatcaggctcagcagagatctataaataattttctgagccgataagaatacgctgttaggtaggcgaccattagacgttgtttacacgactacagtagtgaattattccagagacgaaaaagcccgcaaccttttgggatgcgggctttctctgcgtttaaggccttatctggtaatagccgaaaacttatttggtggagctgggggatttgaacccccgtccgaaattactacgccgttggcactacatgcttagtcctgtcattacattcgcctgttaactgcggacggacacgccactaacaaactagcctgattggttttaacgctttcaccccaggcaggatgtccacgcgagctcttttgggtttgacctttcttgatccccgtcctaagagcggaggctagggagaaagggaaccttcagtgtattagactgattaagctgctaaagcagcagattcgaattgcgagtcgtttgcaattattttttttgcggttttttacgaggcctccgcacctcggcatgcaccttgggtttcgcaaatcccgtcgaatccagaatcagccccaaagaactgtcagcagtatatcagaactttaccccgataagccagagacttaacgtttggcgcttttcataatacgtgctttatcaactgcccactcgcgatttttagccgtgtcgcgcttgtcgtgatcttgtttacctttcgcgaggccgattttgaccttggtccaggcatttttccaatacattgagagagcaactaccgtatagccatcgcggtttaccttaccgaacagcttgtcgagctcgcgcctgttcattaagagtttacgggtacgcattggctcgcaaacaacgtgacttgaagcaacggtcagtggtgtaatggtcgcaccaaacaggaaggcttccccgtctctgaaggtcacataactatcagcaatgttggctttgccagcgcgcagtgattttacttcccatccttgcaaagaaatacctgcctcaatttcatcttcgatgaaatattcatggcgagcgcgtttgttcattgcaatggttgcggaaccgggtttatgtgcttttttctttgtcatagtgacacttattatactgtaagccttgccgaatgaaatcccctgcgggtttgcggaggctgctttttcacagcttgtgctttatctgcctcgagttttttgcccgaagagcgataaatgatatgatctgtatgttttatgacacttggaaaatgatatgcctcaaattagccgttctgcgctagtgccgtttagcgtggaacagatgtacaacctggtaaacgacgtggatgcctatccgcaatttcttcccggatgcacgggaagccgcgtattggataaaactgataacacgatgactgctgcggttgacgtcgcaaaagccggtatcagtaaaacttttaccactaaaaacacgttaaccagcaatcaaagtattgatatgcagctcgtcgacggtccgttccgcaaactgatgggaggatggcatttcacgccgctcagccctgaagcctgtaaagttgagctgaatctagattttgagtttaccaataagctgatcgaactggcttttggcaaaattttcaaagagctggcgggcagtatggttcaggctttcactcagcgtgcaaaagaggtttacagtgtctgacgtttccgttgaggttgtttatgccttacctgagcgccagtatctaaaaacggtgcgaattgccgaaggaagtagcgtcgagcaggcaataatcgcctcaggactgctcgagcagcgtcgcgagattgatctcaagaacaataaagtcggaatttatagccgcccggtgaaattgagcgatgtggtgaacgatggcgatcgggttgaaatctatcggccgctgattgcagaccccaaagagctacgcagaatacgcgcagaacgctcaaataaataaggcgccttaggcgccttattttttaccctgaaagagcttcactgtttgacaccaacgtggcatcaaagctggaacatcaggatttctggtcgtccagctttggcttattgttaatgttagttaacacatctgactcattaaaggtcaaagtcagcgtctgctgctgtacgtcttcgtggcttggccactgacggaatacgtagaaccaggtgttgttaccgaatggatcatccatcatcggtgttccaaggatgtaagcaacctgctgcttggtcatcccggtatgaattttctgaacatcagcaggagccaggtagttcccctgattaatatcaggacgataaacaaccttttccaaagttgaacaaccggcggtcagcattaatagtgctccagtgacggcagttagcgttttacagcgcatagtcttaacattcctttagggcataagatgccgatgataatagacctttcatcagtttgaaacctttgcagggcaccaatatgaccgctgaaatgtaaaaaagttgagctttattacgctgctaacaactcttttgcattggcaagggtgtttcttgtcacctcgctccccccaacagacgggccaactcctgcaaacgtgcttttttatctaaccgattcatctgggtttcagtcacttcaccgtcagtttctttgctgacaaaatagtgctgatgtccgcaacctgcaacctgaggcaagtgagtcacgcacataacctgcgtggactctcctaactggcgcagtagtttaccgacaatcgcagcggttgggccactgataccgacatcgacttcatcaaaaataagcgctggggtttccattttctgtgctgtgataacctgaatcgccagagcgatacgggaaagctcaccgccagaggccactttcgccagcgcctgaaggggttgaccggggttagtggtgacctggaactcgatacggtctgcgccttcaatgctcaggttctcaggaataaactgtacctgaatattaaacttaccgtgaggcattgagagggtttgcatactctgtgtaataagctgagtgagctcatcggcaaagtgctggcgttgctggtgcagcgcatgcgcaatatccagcgcttgctggtggtgaagatgcacggcatcgcttaactcggcctgattggtttcctgcgcgtcgagcgcactttgttcttcgagcagctgacgatgtaactcaggaagctcttctgccgttacgtgatgcttgcgtgcaagtgccatttggcgagagagacgctgttccagttcgaacatacggtttgggtccatctctagcctttcgctgtagtgacggagctcgtcactggcttcacttatctggatagaagcatcatcaagcatgacgatcaggtcattcattttttcatcgagttcagcgagttcggtcagcttgtttttaaccgtatacagcaggctgctgatattttgatcttcactgtcgctcaacagataaagggcactctggcttaatgacagaagctggccgctgtttgcgagcagtttatactcttcgtcgatttgttcatattcgccctgctgcggggcaaattcgttaagttctttcagctgatactgcagaagctgacgacgtgactcgcgttcattaacctgctgttggaactgcgccagcatacggcagctgtgatgccagttctgataggccgttttcatctgagaaagcagaaaagattgcgccgcgtaagcgtcgagcaggtgtttttggtgctcaggcttaaccagcatctggtgggcgtgttgcccgtgtatttgaatgagatggtggccgatttctctcatttgcgacagaggaaccggcgtgccattgataaaaccgcgagagcggccgtcggcgctgatggttctgcgtagaatacagtcctggccttcatcaagctgattatcaatgagccattgtttagcggaaggggtatctgccagcgtaaaacgagcacagacgtcggcccgttgtgtgccgagacgaacagcattgccatcggctctgctgcccaaacagaggcccaaagcgtcgatggcgatagatttacctgcaccggtttcaccggttattgccgtcatacccgcatgaaaatcaatttctaactcgcgaacaatggcaaagttattgatagtaagttgcgctagcatgatcaccttcctgtatataacaacagacctgtaatttcgtacagtataaactggttttatatacagtaaagccctgagtctctgatttcacgaaaaaatcagaataatttttttgaccagcctagtttcgtgcttaatgtattgaaataactgtagtctttaggatgaatcagattcagataataatcacttcgtctgataatgacctcttcaccctgttgaattggcagggcaatctgactgtcacagcttatctccaggtcaatactcatatgcgaaaacttcaggcaaatagtgctgctgctgttgataaccagcggtcgggccgagagggtatgtgggaacatcggcaccagcgcaatcgcgtccagcgtcggcgtcagaataggaccaccgcctgagagcgaataggccgtcgagccggttggcgttgaaataatcagcccgtccgaacgctgggaaaaggcgaagctgtcatcgatataaacttcgaattcaatcatatgcgcgaccttgcccggatgaagcactacctcgttaatcgcggtgcttacccggctctgctcgtcgccacggcgcacgattgcctcgagcaggaagcgctgttcgctgatatattcgcctttcaacacgtcgtcgagttgctgtagggcattatcgggatcgaggtcggtgaggaaccccaaattgccacggttgatgccgatcaccttgatatcgtaacgcgcgagaacgcgtgcggcaccgagcatgttgccgtcaccgcctaccacgacggccagagaggcaagcttgccgatttcggccagcgtcccggtctgcgcgtctttcaaggataaatcttgagccacctgacgctcgacgatgacctggtgacctttcgagatcaaccagtgataaagcatttcatgggtagccagagcggaaggatggcggggatgaccaactatcccaatacactcaaattttttgttcattgctttggttatcctcgaaaccgcatgtgtgtcacctggagtatggcctgtaaatcagatatcaggccttgaaaccctagttttgatccccataataagccaactagcaagattaaagctaaaacgcggagatattcatgagtagtaaagaacataagacgcctaacgagcaagcctcggatgaactgaatcaggaacaagagctgcacgcggaagtggaaactcaggcggctgacgtcgttgatccgcgtgatgcacgtatcgccgagctggaagcccagctgaaagaaactcagcaacgcgagcgcgaaagtctgctgcgtgcgaaagctgaagtggaaaacattcgtcgtcgtaccgagctggacatcgaaaaagcgcataaatttgcccttgagaagttttctggcgaactgctgccggttatcgataacctggagcgcgcactggacttggccgacaagtcgaatgcagaactcacctcaactatcgaaggcgttgagctgacccttaaatctctgttgggtgcagtgagcaaattcggtctcgaagtcgttaacgacgtccatgtcccgttcaacccggaattgcatcaggcaatgactctgatggaatctgaagagctcgagccgaaccacgttatcatggtgatgcaaaagggttacaccctgaatggccgtttgcttcgtcctgcaatggttgccgtttccaaggctaaagcctgattcgaccctgttccagaacgtcaaaggcacccacggggtgcctttttattttgtgtctgcgagatagagtcatcgcttatgccggcagttttggcatccagtcaatcggcggcagtccctgctgttcaagcagctgattggccatcgagaaatgcttacagcccagaaaaccgcggtgggccgagagcggcgacggatgcggggcctttaatacgcgatgtcgtaccgggtcgataatgctgcctttcttctgcgcatgcgatccccagagcaggaagaccacgccttcacgatgcgtattcagcacgcttatcaccttgtcggtaaaggtttcccatcccaatttggcatgagagtgcgcctgcccggcctcgaccgtgagcacggtgttaagtagcagcacgccctgatcggcccagctttgcagatacccgtgatgagggcgctcaaatcccgggatgtctgtcgccagctccttataaatattgaccagggaaggaggcgctgggatgccaggtttcacggaaaaggacagtccatgggcctgatttgggccgtggtaagggtcttgcccaagaataaccaccttgacctgtgagaactcggtcgagcgaaaggcgttaaatacctcttcctgaggcggataaatagtcttccctgatgcacgttctgtcgcgacaaatttcagggtatccaaaaaataactctgctgtttttcctggccaatcacgtcgtgccaggtgagcgggactgccataagcgctctccatttatacgaaattttaatctgcgtagcttacctgctcaggctcgccagagatactctctctgcgtcctaattgatttttatcaacacggctttctctgccaactgatataccagaagcatgcctaggaaggattgccgccctcatcagacgacgatcgcttgctcgtttcaattttaagaatggagagaaactatgatcatcgggatccaaatcactcaggccaatagcgacgcgcttaaaaactctttttggctgctggatgacgaaaagtttgaggcacgctgtatttgtgcaaaatcaggctatcaggaagggcaaactgtgccggttagcgaattgggtaaattcgaatatcgtgaaataccgctagagattcagccaacggttcgcgtagaagggggcagcatcttaacgttaacgtcatgcgtcgtgagacgctcgaagatgcgataaaacatcctgagaagtatcctcagttgactatccgtgtctcggggtacgccgtgcgttttaactcgttgacgccggaacagcagcaggacgtgatcactcgtactttcactcagagcctgtaaaaacaaaaagccccgtcattaacggggcttttagcaggattaaaacaaaagttaactttcttctgttttcgccttgcggcgtttacccacgtttttcgcatcgcgatggcgtactttcaccttcacttttgacttctcggcttcttgcttctgcttctctttacgcttggccagcacttttttcgacggtttaccggtcgtcttggcgcttggcgccttggtttgcggccttaactcatcaatcacgcgtgacttcagaggctgatccagatagcgctcaattttaccgagcagcagatggtcatgcgcctcgaccaatgagatagccgtgcctttacgtcccgcgcggccagtacggccaatgcggtgcagataagtgtcggcagtcagcgggatatcgaagttgaacacgtgactaatgtcattgatgtccagaccacgtgccgcgatgtcggtggcgaccagcacgttaacgcggtcttcgaccatacgtttaacagcttcggtacgcttaacctgcaccatttcaccttcgagatagcaggaattgatgcccgcctcacgcagccagccaaccagttcgtgcacgcgctcacgtttacgcacgaagaccactgatttggtcacgtcttcctgcttcagcaggtggcaaagcagcgcagtcttgtgcttcaggtcgtctgcgcggtagtaccactgcaggatctttttgcgctcacggcgtgaaggatcggcctcgatctcgaccggttcggtcaggatacgctcggcgaattcacgaatcgcttcaccttcaagcgttgccgagaacagcaacgtctgcttacgccagcgggcctcggccgaaatggtctcgatatcttgagcaaagcccatgtcgagcatacggtcggcttcgtcgagaattaaggtttcgatcgcgcggcagtcgaagttttcttcttttatatactgaagtaaacggccggtggtggcgacgacgatgtcctgattctcgctgaagacttcagcgtggttcatgtaggctacgccaccggtaatggtcgcgatatctaattcagtatgtgcggccagttcacgagcctggtcagcaacctgcatcgccagctcacgggttggcgtcaggataagaacacgtggtggaccagactttttacgcggaaagtccagcaagtgttgcagagcaggcagcaggaatgctgcggtcttgccggtgccggtaggcgccgaacccaacacgtcgcgtccgtccatcgccggcggaatggcctctgcctgaatagcagtagggcggctatagcctttgtcgctcagcgcttcgatcaggcgttcatcgagttcgagttcggaaaaattcgttacagtcatggtctacctctacttggggcgccgattatagacgtgttagccgcgtacttcacctatttaagcgtaaaggggcgcttttactcataatggctttgtcttatgcttagcgcattatgccatgaacaccttatatttcggtgaaaacaacaggaaagcgtagtgactgaagcccgcgccagcaagcctcttcgaggtaacggatttacctttaaacaatttttcgtcgcccacgacaggtgcgcaatgaaggtaggcaccgacggcgtattgctcggcgcctggtcaccggtcgagggtgccaggcgtattctggatatcggtaccggcaccggccttgtcgcgctgatgctggcccagagaacgcagaatgaggttcgcgtcgatgccgttgagctggaaagtgccgctgcggagcaggcaaaagaaaactttgccgagtcgcgctggtctggccggcttcacgtctttgctgaggacgtgaaccatttcgcccaaaacgcggcgcagggctatgacctagttgtcagtaatccgccgtactttgagtccgcggttgcctgccgtgacgaagcccgtaatgccgcgcgctataccgaaacgctgacccatgaggcgctgttaggctgcgccagcaggctgttaacgcctcacggcaccttttgcgtagtcttgccctatgagattgggctgacgttcgaacaggctgcggcggcgcaaggctggcatactcgtgcgcggatggacattcgtgatcggcctggaaaaccgttgaaccgcatgctgctggcgttgacaaaacagccgggagaacccgactaccgcgagttggcactccgtgagcagcttaacgtctacagcacggagttcagacgtctgattactgatttctacttaaattactgagtattctctgaaatcagggctgcaaaatagtgggttgaggatcgtcaagcagatcgggatagtcgagcgtaaagtgtaaacctcggctttcctttctcgccatcgcgctgcgcacaatgagctcggcgacctgcaccagattgcgcagttcgagcaagttgttcgagatgcggaaattggcgtaatactcgtcgatttcatgttgtagcatattaatgcgtcgcagcgcgcgctccagacgtttggtggtgcgcacaatgcctacatagtcccacataaacagccgtagctcatgccagttgtgctgaatcaccactttctcgtctgagtcatcgaccttgctttcatcccacgccggtaaactcttcggcattttgatacgcggcagtcgttcgagaatatcttcggcggccgaccagccgtaaaccagacattccagcaacgaattggatgccagacggtttgcgccgtgcagcccggtatagctcacctcaccgatggcatagaggccgtcaagatcggttctgccgtgctggtctaccatcacgccgccgcaggtgtagtgtgcggcaggcacgatcggaataggatcacgcgtcaggtcaatgcccagcgaaagcagtttttcgtcgatcatcgggaaatgatgcttaatgaattccggcgggcgatggctgatgtcgagatacatgcagtctgcgccgaggcgtttcatttcgtggtcgatagctcgtgctaccacgtcgcgaggagcgagttcgccgcgcgagtcgaagtcgggcatgaagcgggtgccgtccggacgcttcagataagccccttcgccgcgcagggcttcggtcaacaggaaattgcgcgcctgtggatgataaaggcaggtcgggtgaaactgattaaattcgagattagcgacgcgacagcccgcacgccaggccatggcaatgccgtcaccggaggcgacgtcagggttagtggtgtattggtagactttcgccgctccgccggtcgccagcaccacggctttggcgcgcagggtttcgacctgctcgatgtcgcggttccagacatacgcccctaccacacgctgtgtgccgggtaatccaagtttgctcgaggtgataagatccaccgcgttatagcgttcttttacgctaatattggggtgggaccttgctttccctaccagcgtggtttctacttctttaccagtagcatcagcagtatggagaatacgccgatggctatggccgccttctcttgttaagtgatagcgttcttctgcgctgttgccggtttctgtatcaaagagcacgccctgatcgatgagccattgaacgcagtgtttggcgttgctggcaataaattcgacggcctctttgtcacacaggcccgcacccgcgattaacgtgtcgtcgacgtgtgaaccgatgctgtcggtttcgtcgaatacggccgcgatgccgccttgggcatagaaagtggacccttcattgagtggccctttgctaagaacggtgactttacagtggtctgcgaggcgtagcgctaatgaaaggcccgcggcaccacttccaataatcaatacatcactaacaaagtctgatgaaggttgcataacgtatgatgtttgcagaagaagagggaaattcatgttagcctaaatggactggcaaaagccacgagcacatacatccgtttaaaaactttgtgttttatggaacttaacattcagtttgaactccaagcagtacttgctcaggaaaataatgatgaaagctggcagtacgacttttagcgtggagatagctttggggagagattacctcggatgagcgagcagttagcagatcaggttctggtcgagcgggtccagaagggtgatcaaaagtcgttcaatttactggttgtacgctaccagcataaagtggcgagccttgtttcccgctacgttccacagggcgatgtgcctgatgtggttcaggaatcctttataaaggcctaccgagcactggattcgttccgcggtgatagcgccttttatacgtggctgtaccgaatcgccgttaacacagccaagaattacttagttgcgcagggtcgacgccctccttcgagcgatgtcgatgccaacgaagccgaaaacttcgaaaatggtggcgcactgaaagaaatatcgaacccagagaacttgatgttgtctgaagagttgagacagattgtttttcggactattgaagcgcttcctgaagatttgcggatggcaattactctcagggagttggatggtttgagctatgaagagatagccgccattatggattgcccggtgggcacggtgaggtcgcgtattttccgtgctcgagaagctattgataataaagttcaaccgctgattcagcgttagcgatggcggacacttaaagggtacttaggcatgcagaaagaaaagctttcggctctgatggatggtgaagcaattgattccgaacttttgagttcgctttcaaatgacaaaaagcttcaggaaagttggcagagttatcacttgatccgtgactctatgcgcggtgacattggaactgttgtacatctggatatcgcagacagagtggcagctgctttggcaaatgaacctgccaagctcgttcctggcgctaccaaagaatcacaacccttgccacacacctggcaaaagatgccgttctggcacaaggttcgcccgtgggcgagtcagcttactcaggtcggggtcgcggcgtgtgtttcactggcggttattgtcggcgtgcagcattacagccagcaggatgcgaccggtgcttcaccggaaactccggcgttcaatacccttcctatgatgggtaaagcatcacctgttagttttggtgtgccaaatgaaggcagcgtcgcgagcggcccgcaaaatatgcaggaacagcgcaagcgtattaatgctattttgcaggactacgagttgcagcgcagattgcattctgatcagcttcagctggactctgttactccgcaacaggcagctattcaggtcccaggtaatcagtctttaggaacgcaaacgcagtaatgaagcaaatttggtacggtgtttccctactgacgtgcagcatgctcaccatcaataccgcctcggccgagaatccacccgctcccgaggcgttattgcaacaaatgagcgctgccagtcaatcattgaactatgaagttgcctttatcaacatcacgaaacagggcatagattcatatcgttatcgtcatgcgaagacgaaaggcacccagctcggcgatctcctgctgatggacggaccgcgtcgcgaagttgtgcaacgcgggaacgacatcagctattttgagaccggactacagcccttcactttggcaggcgatcacatcgttgactcgctccccgaacttgccttcagtgatatcgccaatctttccaaattctacgactttattgccgtaggcagggcgcgcgccgccgatcgctcaagtgaagtgatccgcgtggtatcacgtgatggaacccgattcagctatatcgtctggattgacgaaaaagacaagcttccgctgcgcgtcgacttgctcgacaaagatggcgaaacgcttgagcagtttcgtgtgatttctttgaccgtcgaccctgatgtggcggaagcgtttaacggcattgataaagctaatttgcccccggtgctgagcattccagactcaagcaagacgcagtttagctggagcccgaaatggttgcctgaaggcatgaaggaagtttctcgtagtaaacgaaacctgccaaacatgcctgttaccattgaatcaaggctttatagcgacgggctgttcagcttctcgattaacgtgaatccgtcgagcagcgtcacttccgatcagatagtgcgtcagggcagaagaacggtgcaaaccgacgtgcgtaacggcaatgagataaccatagtcggcgagttaccaccttccacagccaaacgtatttctgatagtattgtcttcacagggcaataatgggtctgcattttagcgtaagggcagggtactccgatgatgaaagaatgggccaccgtaatctcgtggcaaaatggtgttgcagaactgcgttgtgaaacgcaggccggttgcagcagctgtcattcgcgttcaggttgtggttctcgcgtgcttaacgagttgggtccacagaccgagcacaatttgcaggtcagcagcgccgagccactggagccaggtcagaaggttgaattgggcattatggaaggcagcctgctgcgttccgcgctcatcgtctacatgctgcctctgtttggcgtcatcttcggcggcggtgtacttcaaagcttattcaaggctgatgtttatgcgttgatgggtgccgtggcgggaggggcaattggatttgctgctgcacgttatctggcttctaaggtttcagataaagcggcctatcagccagtcattctgcaggtaggtttaccgcctaatgctttccgtttccagccggaaaccaaataatttccgaccgcgttctaaaaagcgttccattcaccccttaatgaatagcaaagggagtgaggagcgcttttttcgtttctgaggtgccgctttttgccaggcgagaacagactaaccttaatctctgatataaatcgacggccaacattagcgtcgaatcgggatacgattttggatcatgtgctctatcagcgcgatgaacagatcggcgctgaacagggaggtgtagggcaccgagaataaggctctgccgtgcatgtcgagcaatttgatggtctggctattgctgccgccgctgatgaaatgcacctcttcaatcggcacgtggtggccgtcgtcagagtccagcgtacgagcagaaaggcgcagctttttttcgttcatcatcagaaaattgccgcgcagaaagtgccgtatcttactcttgctctcggtaagatagctgaagctgacggtgccatcctgagccagagtattgagcgcctgagggccacgaaacaacagttgctcattcttgatgacttcgataagcctgtccgcatgggcaatgttgggggatattttataccacggcttgtcgatgttttcgcgaaacgccatggtatttaatatcttcctggtatattttccggaacgataacggtaaatgtcgcttattccctcgaatggaataaatttattcttattatcaggttttgaaatgaccagaacaccattttcataaagctggaatatttggcgcggtttaataaactggcggaggataatcagaacaatacctaaagaaatactgaataccgtggacataagaatggcgtgctgctcaaagtagccagattttcccagggtaagcaaaaacacaagctgcaaggcacccgcgaccatcagtagcgtagcgagaaccatggttatccatgagtttgcctttgcaaagccgtgccggctaagcagccgaccttcattgatcatgacattaaccttgtgaccgattgattgttttatctagaaatagttaaaagaaattaatgataaatatgagtggtgcatcgcataactttattttttataacagttagttaattgtattttgcccgcccagtaaatgagcattttcctaaactgccggagccttatcaggcaggcatcggagggatttatctaacctaataattcagtttgatattatttatctaatgtattaattgggccaagaatatcgcggacgttcaccagtgcatttcgcaccgctgcgccacccgcataaaataacaactgcaaaagagactcaataatctgctcacgtgtcgcacccgcattcaacgctgcctgtgtatgagcgcgaagctgaggcacggtatgaccgagcgtaacgcaagcgccaatcaccaccacttcgcgggtgattaagtcgaggccgggccggttgagtatgatgccgaagcgctagccgaaagccagacacctcgtccaaggggattattcagagtcatttttccagtttcgttcggcggcatgcgatttcacccattcttgatgattaccttggcaaaaatccagaactgacggtagatctgatcctcagcgacagagcgttggacatcgtcgatgaacgcgccgacatgatggtcaaaatcggcgagacgttgagaatggcggcgctgagtggactgagtattattatgcagcctgagattttactggctgaagacctcaaaaacggcaatttacgcgctttgctcagcaattttgctcctgagccgaaattcgtgcctcttctcaccctgccaggcaggcaacaaacgccgaaagtccgcacctttattgactttttacggtcacgttttccagtgcgtaaaacgcggtaaagctatcgtatcctttcgtgtaacccgcatacagtgtaagatgcgcccatatttgcgtgggtagttttggtgttgagtccattgctgtgtccatgaaaaaggtttaagcgctatcaattagagaaaatcatctataaatgaagaacataagaaacttctccattattgcccacattgaccacggtaagtcgacactttctgaccgtattatccaaatctgcggtgggttaaccgatcgtgaaatggccgctcaggtcctggactccatggatctcgaacgtgagcgcggtattaccattaaggcccagagtgtcacgctggactataaagcgcttaatggtgaaacttaccacctcaacttcatcgacacccctggacacgtggacttctcttatgaagtttctcgttctcttgccgcctgcgaaggcgcactgctggtcgttgatgccggtcagggtgtagaagcccagacgctggcaaactgctataccgcgatggaaatggatctcgaagttgtgccggttctgaacaaaatcgacctgcccgctgccgacccggatcgcgtttctcaggaaatcgaagatatcgtcggtatcgacgccaccgatgcagtccgctgctcggctaaaactggtgtgggcgtgcctgacatccttgagcgtctggtgcgtgatatcccgccgccggaaggtgaccctgaagcgccactgcaagcgctgatcatcgactcctggttcgataactacctcggcgttgtttctctggtgcgtattaaaaacggcaccatgcgcaaaggcgacaagattaaagtcatgagcaccggtcaggtttacaacgccgaccgtctcggcatcttcacgcctaagcgtgtagacaccgacgtgctgaactgcggcgaagtaggctggctggtttgcgccatcaaagacatccttggcgcaccagtaggcgataccctgacgctggcacgccagccggcagacaaagcgctgccgggcttcaaaaaagttaagccacaggtttatgcgggtctgttcccgattagctccgatgattacgaaaacttccgtgatgcactgggcaaactgagtctgaacgacgcctcgctgttctatgagccagaaagctctaccgcgttaggcttcggcttccgctgtggcttcctgggtctgctgcacatggagatcattcaggaacgtctcgagcgtgaatacgacctggaactgatcaccaccgcaccaacggttgtgtatgaagttgtgactactgccggtgaaaccgtctacgttgacagcccatccaagctgccggcgctgaacaacattgaagagctgcgcgagccaatcgccgagtgccacatgctgatgcctcaggaatacctgggcagcgtgatcaccctgtgtatcgagaagcgcggcgtgcagaccaacatggtttaccacggtaaccaggttgcgctgacctatgaaattccaatggcggaagtggtgctggacttcttcgaccgactgaagtcaacctcacgcggctatgcatcactcgattacaatttcaaacgattccagacttcagacatggtgcgcgttgatgttctaatcaacggcgaacgtgtggatgccctggcgctgatcacccaccgcgataactcgcagtaccgtggtcgcgatctggttgagaaaatgaaagagctgatcccgcgtcagcagtttgacatcgctattcaggctgctatcggcaaccacgttattgctcgttcaacggttaaacagttgcgtaaaaacgttttggccaagtgctacggcggtgacgttagccgtaagaaaaaactgttgcagaaacagaaagacggtaagaaaagaatgaagcaggtgggtaacgtcgagttgccacaggaagcgttcctggccattctgcacgtaggtaaagacagcaagtaagtctttggataagtttgtgaaggagtaggaatggctaacatgtttgccgcgatactgttcgtcgcaacgatagtgtcaggaataatttgggctatcgatcgttttaagctggcgcctgcgcgtcgtgaaaaaatcgcgcgcctgaaagtcgaaacggcgggtgcggtagacgagaaaaccctgagcaaggctgccaagcagccgggctgggtggaaacctgtgcttccgtatttccggttctgctggtggtatttgtagttcgttcctttatttacgaacctttccaaatcccctccggctcgatgatgccgacgctgctgattggcgactttattgtggtcgaaaaatacgcttatggattaaaagatcctattttccagaccaagcttatccctaccggtgagccgaaacgtggtgacgtggtggtatttaaatatcccctgaatccacagctggattatattaagcgtctcgtcggattaccgggcgacagagtcacctatgatccaatgagtaaagaagtgacggttcaaccggcgtgcaataacggacaggcttgtgataaagcattagccattacctataccgccaatgagccaagcaactttgttcaaacctttggccaggcttctggcgaagaggcaaccagcggtttctttgaaacggatccttctgcaccggttccgcaggacggcgttcgtttgctcgcgcgtaaggaaactctgggcaatgttacccataatattcttatcgttcccggcgcacgcgatcagctgagtggttattatcagcagcctggtcaaccgctcggtacctgggttgttccacctggtcattatttcatgatgggtgacaaccgcgataacagcgctgacagccgttattggggctttgtgccagagaaagatctggtgggcagagcttcaggtatttggatgagctttaagaagcaagaaggcgaatggccaacgggtatacgtttaagccgtattggtggaattcattaatgctatgcccgtgactataaagtccgggcatattaacgcagcattatatttccactcgttgtagaatatctcttcgagcgataaaagttggctaccctttttataaaagagagggagccactgcaaacgaaacagctttggatcggcttttggcgaagcaggcctgttccgtatgctgaagtttttgacgcattcttgatctattggtaactcatgaatcccatcgtaataaacaggcttcagcgaaagctgggctacacttttcaacagcaggagcttttattgcaggcactgactcaccgcagcgccagcagcaagcacaatgagcgattggagttccttggggactcgattctcagttttgttattgccaatgcgctgtatcatcgctttcctcgtgttgatgagggtgatatgagccggatgcgtgcaactttggtacgcggtaataccctggcagaaatggcgcgtgaattcgaccttggcgagtgcctgcgtttaggcccgggcgaattgaaaagtggtggtttccgccgtgagtctattctcgcggatacggtggaggcactcattggcggcgtgttcctggatagcgatatccaaaccgtcgaaagactgatcctcgattggtaccgtagtcgtctcgatgaaatcagtcccggtgataagcagaaagacccaaaaacccgtttacaggagtttttacagggtcgtcatctgccgttgccttcttatctggtcgtgcaggttcgcggtgaagcgcacgatcaggagtttaccatccactgccaggtcagtggcttgagtcaaccggttgtaggaaccggatcaagccgccgtaaagccgagcaggcggcagcggaacaagcgctgatacagctggagcttgaatgagcgaagaaaagaattactgtggttttgtagcaatcgtcggccgacctaacgtcggaaaatcgaccctgcttaacgagttgctggggcagaagatctccatcacttcacgcaaaccgcaaaccacccgtcaccggattatgggtatccataccgaaggtccttaccaggctatctatgttgataccccggggcttcacatggaagaaaaacgagcgattaaccgcctgatgaaccgagctgcaagcagttctatcggcgacgtcgagctggttatcttcgtggtggaagggactcactggacgccggacgacgaaatggtcgttaacaagctgcgtgatctgaaaagccctgtgatactggctatcaacaaaatcgacaacgtcactgacaaatccaagctgttgccgcacctgcaattcttgagtcagcagatgaactttgccgatatcgtgcctatttcagctgaaaaagggaccaatgttgacactatcgctgcgttagtgcgcaagcagctgccggaagcgattcaccatttcccggaagactacatcaccgaccgttcacagcgctttatggcctccgaaatcatccgtgaaaaactgatgcgtttcctgggcgaagagctgccgtattccgtgacggttgaaatcgagcgtttcgtgagcaacgagcgtggcggttacgacatcaacggtctgattctggttgagcgtgaaggccagaagaagatggttatcggtaataaaggttccaagatcaagactatcggtatcgaggcacgccaggacatggaaaacatgttcgaagcgaaagtgcaccttgagctgtgggtcaaagttaaatccggttgggcagacgacgaacgtgcgctgcgcagtctgggttacgtagacgacttataaggtcttcgcctatggaaggctggcaacgcgcatttgtcttgcatgggcgaccttacagtgaaaccagcttgatgctggacttcttcactgaagggcaagggcgggtacgcatactggcaaaaggtgcgcgtggccgccggtccaatctgaaaggctgtttacagcctttcactcccttactggtccgctggaccgggcgcggtgaagttaaaacgctgcgcaacgccgaggccgtgtctttggcgctccccctttcaggttcgattctctacagcgggctctacgtcaatgagctggtctcacgcgtgctcgagcaagaaaccaactactcttcgctgtttttcgactatttgcattgcctgcaaaatcttgctgctgccagcactgcgcccgaacaggcattacgccagtttgaattggcgctgttgcatcaccttggctatggcgtcgatttcctgcattgcgcgggcagtggggaagaggtcagtgaaagcatgacttatcgctatcgtgaggaaaaaggctttattgccagcctggtcattgataacgcgagctttaccggtcgtgacctcaaggcgttggcgagtcgtgagtttcccgatgtcgccactctgcgcgccgcaaaacgttttacccgcatggcgttgaaaccctatctcggtggtaaaccgttgaaaagcagagagctgtttcgccagtttgttctgaaaaagcccgcagctcccgccgaaaatcctgccgactgattttgtttgtgcacgcgttaacgtgtaaaatgccgcctctatctgctacgttctgctgcgtctagaacctgcttgggtatcaaaaaattaggagtgtttcatggctgagttattgttgggcgtcaatattgaccacatcgcgacactgagaaacgcgcgcggtactgcgtatcccgatccggttcaggcagcgttcgtctctgaacaggcaggcgccgatggcatcaccgtacacctgcgtgaagaccgtcgtcacatcaccgatcgcgacgtgcgaatcctgcgtgaaaccattcaaacccgcatgaatctcgagatggcggtgactgacgagatggtcggcattgcctgtgaaataaaaccgcatttctgctgcctggtgccggaaaagcgtgaagaagtgaccaccgaaggcggcctggacgttgcgggtcagaaagacaagatgaccgtggcggttgagcgcctgtctcaggccgggatcctggtttctctgtttatcgacccggatgtgcgccagattgatgccgccgttgccgtgggcgcgccttacatcgaaatccacaccggtgcctatgctgaagcgcctgaaggcattcaccgtgatgcagagttcaagcgaatcaaagaagctgcgacctacgccgcgtcaaaaggcctgaaggttaacgccggtcacggtctgacctacaaaaacgtacagcctatcgccgccttgccagagatgcacgaactgaacatcggtcactcgattatcggtcaggcggtttttgacggactggccggtgcggtaagcgagatgaaagccctgatgcgtgaagcgcgtcgctaatggctattcttgggctgggcaccgatattgtcgagatagtccgcatcgaagcggtagttgaacgcagtggcgacaggctggctaaacgtattctcagtgccaatgaatggcagctgtacctgaatcaccagcaaccggtgcgttttctggccaagcgttttgccgttaaagaagcggctgccaaggcgcttggcacggggattcgcaacgggttggcgtttgagcagtttgaagtggtcaacgatgcgttgggcaaaccgaatctgatttttcacgaccgtgcggcagagatggccgccgaattcggcgtgaagtcagtgcatgtgacgctggccgatgagcgccactacgcctgtgcaacggtgattatcgagaactagcctttcacgacaacgttaaccgctgcatccttttgtcgacttaccgttgtgcagaatggtgcagcaccacgaacttgtcccaaagctggtcattggtttcgacgtgccgcgggtcgatgataatcgtattgtcgatcgggcatactttctgacaggttggggattcgtagtgccccacacattctgtacagcgttcgctgtctatctcgtaatactcacttcccatcgcgatggcctgattagggcactccggttcgcacatatcgcagttgatgcatttagcggtgattagcagcgccatagcgtcttattctcaggatttaaacgggcgcgaattataacaaacatccctgggctaataagcttccggccccgttatctgcaacaaacctgatctgggtcaactcagctttttcaccaacgcctcgctgtgtttgatgcgttctggggcatgttcggtgtcttgttggatgagcgccataaacaggatatcggttagcgaaaactgtgcggtactggccgaaattgccgcaccgcgcgtgactggcagttcggcgagggtatacagacagtggtcggcctgctgttgcagcgtgttgggagagaaactggtcaacgccagcgttttagcgcccgccttacgggcaacctctgccgcaagattgatttcccgccgttcgccactaaacgaaatggccagcagcagatcctcactcgagagcgcctgcaccgttgccagcaggacgtgggtatccgactctgcgatcgccgtgatgccgattttcaacagcttataggcgaagtccttggcgaccagccccgatgcccctagcccggtcagcacgatttttcgtgcatcagtgagcataaacagcgcctgctggaaccgttgctcgctgttgacgtccagcgtggcacgcagagccgcctgcttctctgccagcagtttttcgccgacggtcaacaggctgtcggtgctgagtatccggttatgcaccgtgatagccgggtccgtctgcggggcagacatcgcctcgcttagtgccagcttgagcgccgggaagcccttatatccgagcttctgggcaaacttgaccacgccagattgactcacgcccgccagctcggccagtttttgcgagctaagatgtcgtgcattctctggctgcgtaagaagaaaatcggccagttttttatcattctctgccagctgtgggtacatctgacggatgcgtatcatacagctcatgatcctgtgtcctgccgtgagttcctggtggtgatgtctctaaactagcaaaaaaaactcgctttgctgaataaactattcaaatatgataaatgaatttcgaattaaatattcaagaggtcatgatgaatttaggcgctttggtatctgaaacccgcaacccggccacgtctcgtctggatgaaatgtccacgctggagatggtgacctgttttaatgatgaagaccgaaaggtcccgcaggctatcaacgcggtgctgcccgagattgcgcaggcggttgagctggctgcggcgtcgttcagtgccggtggacgcctgatttatctcggcgcaggcaccagcgggcgtctgggcgttcttgatgcttctgagtgtccacccacctttggcgtgccgcacggtatggttgttgggttaattgccggcggacccggcgcgttgctgaaggccgtagaaggtgctgaagatgacccagcactcggtgaagaggatttaaaaaacctgtcgttgaccgccgccgacaccgtcgtaggtctggccgcttctggccgcacgccttatgtaattggcgcgctgcgttatgcccgtgcagtgggctgtgccacggttgccatttcctgtaacccggattcacctatcgctcacgaggcacaagtggcgatttcgccggttgtggggccagaggcgctgacgggatccacgcggctaaaatcgggtactgcgcaaaagctggtgctcaacatgatctctaccggcgcgatggtcaagattggcaaggtttatcagaacctgatggtcgatgttaaggcaaccaacgtaaagctggtggatcgcgcctgccgcattgtggtcgaagccaccggggccgatcgtgccgaggccgagcatgcgctgaagcagaccgcatttgaagtgaaaccggccatcctgatgattctcgcgcagatcactgccgaacaagccgcagagcgtttacagcgccataaagggttcctgcgcgccgcgttggcggaatagtcgcgcgatgcctttgtttgacgcttgacagggtaaaaagggggaggagcaatggcaacggataaaacgcgggttctggcaacggaaatcctcagcggcgtgggcggtgagggcaatatcagcagactcgaaaactgtatgacgcgggtgagaatccaggtccacgatgaacagctactcgacctgcctacgctgaaaaatcttgaaggggtcaagggctacgtcaagcaagggcagcagcatcagctgattgtcggccccggtgcggcgggaagagtggttgacgctatgcgcgagcgactttcctccgccgatccccttgctaaagcacggctagaacacaataaggcacaggccaaagtgaaatatgctgcgccaatgagtggcgcgctgcgtcaactggcgaacgtgtttattccgcttatcccgcttttatcgcctctggcctgattaccggcatcatcaatctgcttaaacgtcctgacatcgccggcagtctggcgctggattaccccaatctcttgggactgctcggaatatttggcggcgcggtatttgccatcatgaatattctggtcggcgttaacgcggctcgcgtctttggtggctcgcaggcgatgggcggcgtaatggccgggatcctttcaagcccgcagctggcacaaatccacctgttcggcgaagcgctacagcctggccgtggcggggttatcgcggtccttctggtggtcgctctaatgtgctggattgagaaacgcctgcgccagtggctacccgaatcggtcgaacttatcctcaaccctcttttcaccacgcttattaccgctacgcttgctatcgttattctccagcctctgggaggcgtgatttccgatgccattgcgcacggcgtcaatcttgccattgacagaggcggactgtgggtcggtgcactgttggccggatccttcctgccgctggtgctctcgggtctgcatcagggactggtgcccattcacgttgagcttattcagtcacacggttccaacccactgctgcccattctggcgatggcgggcgtcgggcaggtgggagcggcgattgcggtgttgctgaaaacccgcaatccccggctcaaaaaagtgattaaaagcgcgctgccggtcggcattctcggcatcggtgagccgttgatttttggcgttacgctgccgctgggacggccctttatcgccgcctgcctcggcggcgcagtggcggggcgctaatatgttattggaaagtcgcgacggtaattacctttggtatctcgggtttgcctttggcgctgactattatctccggtaaagtgggactgtatctgaccggtgcgctaatcacgctggtggccggctttatttttacctggattatggggttcaacgatcccgaggagtaacgcattgggcgcgaggacggatcgacgggtggtattttttgatctcgatggcacgttgcatcagcaggatatgttcggcacttttatgcgctttttgctgcgaaaaatgccgcaaaacctgctgctggtgatacctgtactgccgattatcggcgcaggaatggtgctttttgggcgggccaaacgctggccaatgagcctgatgctgtggtcaatcaccttcgggcacggtgaggcgcgtcttaaggcgcttgagctggaatttgtgaactggttccgtcacaaagtggtggcttttcccgtggtgcaaatgcgcctgcgtgaatacctcgaccgcgacgacgccgaggtatggctgataaccggttcgccggaaaatctggtgcgcggggtgtataacgcctcacctttcctgccgcgcgtcaggctggtcggtagccgcattgctcgtcgttacggcggttgggtgctgaccctgcgctgcctcggcgaagaaaaagtcgtgcagcttgagcagcgcatcggttcccgctgaagctctacagcggttacagcgacagcaagcaggacaacccgctgctgtttttctgtgaacatcgattccgcgtcagcaagcagggcgaactacagcaactggagtaaggcggcgcaattgattaaaaaacgccgatcatttgttaagctcatacttaacaaaaccggtcgctatactgtgtaagcaggttctcgcagtgtatgatagccgccgttttagtcagggtgaggtttacgtgatagagcaatacagcgatcaatactggatgcagcacgccatggcgctggcattaaaggcgcaggaagcaggcgaggtgccggtcggcgcggtattggtgttgggtaatgaagtgattggcgaagggtggaaccgttctatcgggcatcacgaccctaccgcacatgccgaaatcatggcgttgcgccagggaggcagggtggtgaaaaactatcgactgctcgatgcggtcctctatgtcacccttgagccgtgcgtgatgtgcgcgggtgcgatggtgcatagccgcattcgtcgtctggtgtatggcgctgcggataagaaaaccggggcggcgggatcactgcttgatgtgctgcgccatccgggcatgaatcaccagattgatatcacctccggcgtgctagccgacccgtgttcacatcagctcagcgagttcttccgactgcgacgcagccagcagaaggcgctgcgacaggcccatcgtgcggccgccaacgagactcatcagccagaatagagcgcgagaggcttagcctcccgcgttttttagcgcgctcagtgagaccgccggataacccgcaccaagctgggtctgtaacagcagcgcctgcgctttttgtttctctttctccatcaagtatcccaccaggcttatctggtatttacggatattctcgacgtagttgaacgcctgggtaccgcgtgcgtagccgtaagtcgtcttgctgtagtagcgtttctgattcagcaacggcaggcgctgcttgacgtcaacccaactgtcgggattgccattctgcgccgcagtaatagcgcgcgcgtcgagcatgtgcccataacccatattgtaggcggccaacgcaaaccagattttgtcgtcattgtcgatggtggtgggcagtgaatcgataatgtgattcagatacagcgcaccgccgcgaatactctcctcggtgtcgagtcgatcgctcacccccaatccttgcgcggttgcgcgggtcagcatcatcatgccgcgtacgccggttggcgaggttgcgtcgggatcccagtgggactcctgatatgagatggccgccagcagacgccagtcgatgttgccagcatatttttcaaagaatggctgtagggtgctgagtttggcatctatattgttgaggaaggcacgagtgtcgacaaagtcgaagttacccacgtggcccagatacttctcctcgagcttctccagcgtgccgtcttctgagatttggctaaagaagtcgagcatggcggcatacaggctgtcgtcatcggccttcttgctaaagtaccaggttaccggctcgtcgtcggaggcatcaaacgccaccgccaggcgcgggtaaacgcgttgcagcagggcgacggtcacggagtcgcccagggtgtatttgagctttccttcggcaacttgctgcatcagttcggcaggcgaataacgacgggtgacgccccagttgagatcgggaaacttcttcttggcgtcttcgagggtggaaatatgagccgagcctgccgagacaaccatattacctttaatatcggcataggatttcgggcgcaccgaaccctgacgataaagcacctgctggagaacggtatagtactccggcccggtacgaaatgacttcaaacgttcggcgttgtagaccagacccgaagcgagcatatcggctttgccgcttttgagatcgctaaacaggctgtcaaaatctttgtgcggtatcaataccagcttcacacccagataatcggcgaaacggctggctaattcataatcaaatccccggtcaccggtggcgccgttaaaaaagtctgtgaagcgtcgagcgtgctcacgcgcaactccccacgggacaggatgttttgtagctggtcaccggaaccacgctgccatggaatgctcggccaaagggcgagcgccagcagcagggtgatcagacctacaactaagtaagtaatttttatgcgcttcaaatagttatctctctgcggcgctattcttttaataagctaaaatggtgctgaaaatagggctataatcccggtgccgacgcattttgctcaacaaaacgtcaatctgcaactttattcccaataacccctgtaaactgtaaggacaaatctattatcaataaaccgtgcgcaaacggtttcgtcgcgctcgaggattctctataatggcccgcgttttccccctgttgcgcccaatgaagcacctacggtcagttgcttcgaagacgagagatatttgattatggaaatactgcgtggttcgcccgctttgtcggcttttcgcattaataaactgctttcccgttttcaggaagctcagcttccggtaaacgatgtctacgccgaattcgtacacttcgccgatgtcagcgcacctctgacaacggaagaacaaaccaagttgcaacgcctgctcaaatatggtccttctctcgctgaacatgctcccgttggccgcctaattctggttacaccacgtccgggcacgatttcgccgtggtcttccaaagcaacagacattgcccacaactgcggtctgtctcaggttgtacgccttgagcgcggcctggcgttttacgttcaggctcccgaactgaccgaagagcagtggaaaaccctcggtgcgctgctgcacgaccgcatgatggaaaccgtcttcagcgagctttcagacgctgaaaaactgtttgcccagcaccaaccggctccggttcagcacgttgatctcctcggagaaggccgcgtggcgcttgaacaggctaacgtcaaactcggtctggcactggcagaagatgaaattgactacctggtcaatgccttcaccaaccttggccgtaacccgaccgacatcgagctgtacatgttcgcgcaggctaactccgaacattgccgccacaaaatcttcaacgccgattggattatcgacggcgaagcacagcctaaatcgctgttcaagatgatcaaaaacacctttgaaaaaacccctgaccacgtgctgtctgcctataaagacaacgccgccgtcatggaaggttcaaaggttggccgtttctacgccaacgccgaaaccggcctgtacgatttccatcaggaagacgcgcacatcctgatgaaggtagagacccataaccacccgaccgctatctctccatggccgggcgcagccaccggttccggcggcgaaatccgtgacgaaggcgcaaccggtcgcggcgcgaagccaaaagctggcctggtcggcttctcagtttccaacctgcgtatccctggatttgaacagccttgggaagagaacttcggcaaacctgaacgtattgtgaccgcgctggaaataatgaccgacggtcctctcggtggtgcagctttcaacaacgaatttggtcgtcccgcgcttcttggttacttccgtacctatgaagagcaggtgaacagccataatggaccagaactgcgcggatatcataagccaatcatgctggcgggcggaattgggaatattcgtgctgaccacgtgcaaaagggtgaaatcaccgttggtgcaaaactgatcgtgctgggtggcccggccatgaacatcggtttgggcggcggtgcagcgtcatctatggcgtccggccagtccgatgccgacctggatttcgcctccgtacagcgtgacaacccagaaatggagcgtcgctgtcaggaagttatcgaccgctgctggcagttgggcgaagcgaacccgattctgttcattcacgacgtgggcgcgggcggactgtctaacgccatgcctgagctggtaagcgacggcgaacgcggcggccgtttccaacttcgtgatattctgaatgacgagccgggcatgagcccactcgaagtctggtgtaatgaatctcaggaacgttatgtgctggccgttgcgccagagcagctggcgcagtttgacgctatctgccaacgcgaacgtgcgccttatgccgttatcggtgaagcgaccgaagagatgcacttgacgctggaagacagtcatttcgacaaccagccgatcgacatgccgctcgacgttctgctcggcaagacgccgaaaatgacccgtgacgtgcaaacccttaaagcgaccggtgacaggcttcagggcgaaaatattcaaatcgccgaagcggtgaaccgcgtactgcatctgccgaccgtggccgagaaaaccttcctgatcactatcggcgaccgcaccgtgaccggtatggttgcacgtgaccagatggtgggaccgtggcagattccggtagccgactgtgcggtgaccaccgccagcctcgacagctaccacggtgaagcgatgtcgctcggcgaacgagcaccggtagcgttgctggacttcgccgcctctggccgtctggccgtgggtgaagcgctgaccaacattgccgccaccgaaatcggtagcctcaagcgcgttaaactttccgcaaactggatgtctgcggccggtcacccgggtgaagatgcgggcctgtacgaagccgttaaagccgtgggtgaagagctgtgtccggcgctgggtattactatcccagtaggcaaagactcgatgtcgatgaaaacccgctggcaggaaggcaccgagcagcgcgagatgacctcgccgctgtctctggttatcaccgcctttgcacgcgtcgaagacgtacgccataccgtgacgcctgaactgcgtaccgacaagggcgacacctcgctgctgctgattgacctgggtgcaggccacaacgcactgggcgcaaccgcgctggcgcaggtttatcgtcaactgggcgacaaaccggccgacgtgcgtaacgtcgagcagctggctggcttcttcaacgctatgcagacgctggtctccgagcagaaactgcttgcttaccatgaccgttcagacggcggcctgctggtcacgctggcagagatggcgtttgccggtcactgtggcctgactgccgatatcgcgaaactgggtgactctgcactggcagccctgtttaacgaagagctgggtgcggttatccaggtacgtaacgaccagcgtgccgacgttgagcaagtgctggcaaaacatggcctggccgactgcacgcacttcctgggcggcgtcgaacagggcgatcgcttcgtgataacttctggcgacaagccggtgttcagcgaaagccgcacgacgctgcgtacctggtgggcagaaaccacctggcagatgcagcgcctgcgcgacaatccagagtgtgccgaccaggaacacgaagccaagaaagacaacagcgatccgggtctgaacgtcaagctgaccttcgcaccggaagaagacattgctgcgccttacattgcaaccggcgcgcgtccaaaagtggccgtgctgcgcgagcagggcgttaactcccacgttgaaatgggcgctgcgttccaccgtgccggttttgatgcggttgacgtccacatgagcgatctgctgtccggccgccgtgacctgcaagagttccatacgctggtggcctgtggcggcttctcctacggtgacgtattgggtgcgggcgaaggctgggctaagtccatcctgttcaacgaccgcgtacgcgacgagttcgaagacttcttccatcgtccacagacactggcgctgggtgtgtgtaacggctgtcagatgatgtctaacctgaaagaagttatcccgggcgcagagcactggccgcgtttcgttcgcaacctgtctgatcgcttcgaagcgcgcttcagcctggttgaagtgaccgccagcccgtctctgctgctacagggtatggccggttcacgtatgccaatcgctgtgtcacacggtgaaggccacgtggaagtgcgcgatgccgttcacctgtctcagcttgagcatgcgaatctggtggcgctgcgcttcgttgacaacaacggacatgttaccgagaactatccggcgaaccctaacggctcaccgaacgggattacggcagtgaccaacctctcgggccgcgtaaccgtgatgatgccgcacccagagcgcgtattccgcagcgtcagcaactcatggcacccggaaaactggggcgaagacagcccttggatgcgtatattccgcaatgcccgtaaacagctaggctaataacgccttgggctgatactaaaatccacagcgctacggcctgtggatttttttttgccaactttaggcgttggccagttttacgtgctcgagaagcatacagcggcaggtgtcaatcagttccttccggtgcaggatgacgccttcataggcgatgtcccgggttgcagggaagtcgggatattcaacggcattgttgaaatgggtcaggcatttttggtcgaagcgcgctttttaatctttgagccagcgatatttcgctttcaaatatttgcggtctgatcacgtcgtccagaaaatggagatcgttaatcacctctttaagatactctctttgaatctgatatttcttttggttttgctctaaactgcgttttgatgctgtatttttcagagggatgggtgggtaaaccaaaaatcatactggcgcgtcaacggacttattcgattatcgatataacagagtttatccaatgacgtagggcataaataattattgcacaccgtcgatatattattgctgaccggaagaaagggtgcggagaggatattgccaagagcagaaataatgcctgtcgatctcattaaattcacttttgatattattatgtgggctctttttttattttaaaaacaataaggaagagggccaataaaataggccatttgggcgaattagaatattgaattttgctcaaaatgtcgcttgatttctgagaggtcaaactttatcgttgtatatcataatgcataacggtggcttatcgtgcgtgaattctccaataaaaatctcaataagaaattaaagaatctcggttctggcctgatgttggcctctatggcattcgccagtgcatcggcaatggcgcaggacaacatcaacgtgacttacgccggctcgatgggcgtggtaatggacaaataccttgggcccacctttgccaaacaggaaaaactgaattatcaggggcagggcagggtgcatacggcatggcgaacctgttagcgtctaaaaaagtggttgccgatgtgtttgtttcaatcacaccgggtcctattgatgtgttgaaaaaggccggtctggtagacacctcggtacccgttgcgagcaccagcatggtgattgcctataatccgaagggcaagtttgcccaactttttgcggcgataaaagaccacaagcctggcgcagagccttggtggaaggtgctgcaaacgccggggctgcactttggccgcaccgatcccgccacggatccccaggggcaaaacatcattttcaccatgatgttagccgagaaatactatcatcagccgggtctgaccaaaaaagtgctgggtgagacgacaaacccttcgcaagtgctggctgaaggcggtttgttgactcgtctcgaggcgggtcaggttgatgccgcctcgggttacgaaagcgcgacgcgttcggctaaactgccgtatattgtgttgccggacgaaataaacctgagcaaccctgaaatgtctgccaagtggtacgacagtgttagcttcaacatcaaggacagcgcaggcaaagagaaaaccctgcatacccaaccgctggtgttctatgccgcagtgttgaagaatgcgccaaatcctgcggcggcgaagcgttttgtcgcctttatgcagagtgcagaagggcagaaaattttcagtgaaaatggctacgataaacctaaaggccatgattattaatcagaatcgtgcataaccaaggtcgccggatgatcagtctgtggctggccatcccggcccttgccctgttagctattccctttatcaccctcgtctcggtcacaccgtggcgaggatttcatcttgcctatggcgactggcattcggtcagtatttcgttggggctaagcgcggtttcgattccgattatcgtggtactgggcattcctcttgcgctttggatgtcgcgcagccagagccgttggcgtccatgggttgaggtcgctgtgatggtgccgctgctgacgccgccgttggcgatgggcatactgttggtatccgcctttggtccttacggcactgttggggaagacctctcgcggttgggtatttcgctgaccaataacgcgggcgcttttgtgctggcgcaagtttatggtgcgctgccttactttgtgatgtctgctcgcgccgctttcgaaggcgtgcctgccgacgttgaggaggccggtaaaacgctgggcgcctcgcgctggcagatcctcacccgcctgacgctgccgatcgcctcgcgcggactggcgacgggattagcgatagcctgggtgaggattattggcgagtttggcattgtgatggtgttttgctacttccccaggggattccggtaaaactgtttatcaacctgcaaaatgacggcgtagattcggtttattctctgctgtggatactgttgattactactctgccatttcctctgtggtgtttttcgcggatgggaaatcggaagaagggcaatatgacgttggcagagtgaacaacgcaataatttccctgcgaagattaattaataattttcctatatcgattgttttttaaaaaaaagtaatggttatcttttttggttttatcaattctaaccttttattgaaatattttttattccctcgcagtcatcatgattatccctatttcttccagttaattaaatttttaagcgttatgaaagacgctgtttattatattgcatggatttttacgttattgtaggtgctgtagtattgaataatgatagccaaatggtttgtatgcgtataaataaaaaaatttccaaaacattatttattggattatgcctgacggccacgccggggatggccgcctcctcactcaactcgaccatgtcgacaactccaccagcgacgcagcagtccggattcaacggtgggtgggcttcgtggaagaacgacgtttcgagcacctggaatgcctcacccgaccgggatctctacctaccggtcattacctggcataaccgtgccacctacgaccgtgccaagattgataaatacaacgagcgtccctgggcggtggttacggtatttctcgctatgatgaaaacggcgactggcacggtctctacgtgatggttttcaaagactcatttaaccaatgggagcccattggtggttatggctatgagaagatctggcgtccggtgcagggtcagaatttcaggctcggtttaggctataccgccgccatgactgcgcgtggtaactacaaatatattcctttgccactcgtgctgccgctggtctctatcggctatcagcgtctgaccttccaggcgacctatattccgggcacacacaataatggcaacgtgttctttggctggttaaggttccagttctaaaactttctcctgtggaatcagcgctgtgagccagatcccctctgacaaagcctgatcctttatgcttgatttcccttgtttttatgagccttaacccgctataaacattaagaagtcatttaattcatcaggagaaacacgtgaaaagaacgtcccgtcttgcgcttttaactaccctggcctgcgtcatttctgcttccctgcctgctgtcgctgccgacaataatctctctttagaacaggtgcttatctttagccgccacagcattcgcgcgccgctctctaactataataatgcgttgggcaatgcgaccacccacacctggccaacgtggagcaccgaaggcggacttctgaccccgaaaggcgggcaggttgaagagcacgttgggcagtattaccgccagtggttagcgaaaaataatctgctgccggccaaagggtgtccgcaaccgggcgaggttttcacctacgctaacagcctgccgcgtaccattgatactgccaaacatttcctcatcggcgcatttccgggttgctcgcttcctgtggtgaatcgcgttgaagtcgggaaaatggatccggtgtttaatccgattatcaccgccgacgttacggatcagtttaaacaggcggcgatcgacgccaccaataagtcagctggacaggccggactcgatggcctgaatcagcgtctgacgccaaactatgcgttggttgaaaaggtcatggatttcaaaaattccaaaacctgcaagcaggataaggtctgctctcttgcagcacagccttcgaatctggtgatcaatcagggcaaggaaccggggatttcgggaccgctgtcgttgggcaccggaattagcgatgccttcatgctgcaatattatgagggtttgccggagaaggacgttgcgtggggccagataaaaacgcctgagcagtggcgtcaggttgaggaattcaaaaatgcagaccagaaggccatcttcagctctgagcaaattggtaagaatgccgcagccccaacgctgacgtttatgtcaggcgtgctggataaatctcaggctaaaaccgccgatcagcaggcggcgcagcaggctcgggtgacgttgttagtcggtcatgactcgaatattgccgcctttgtttcggcgctcaagattaaagatttcactctgccgggtcagtatgagcgtacacctatcgccggagccgtggttttccaacgctggcatgataagaaaactgacaaagatctgataaaaatcgaatacgtatatccaactgcgatacaaatccgtaacaacagcacttatagcttaaaaaatccgttacaccgcgttgttttacaagctgagggctgtcctattgataataaaggattttgttcagcggacgtcttcaatcaagtgctgaaggattccttaaaaaactaagtttttccttatttaaacaacttggatctcatttaattacatttaagtaacaacattgtgaatgattcgatctacaatggttgccagtgacaccccagaagaaagaaagactctctctgatagaccagtttgttctgcccgtacctctgtgcgggcttttttttgcccgtaataaatgcgtctaaggctttttaagggagggcgtgctggaggagagtaaaactcgcaggcgcatggcctgcgggcaatagcgttcttttattgggtttcaatcgggtaatctttattgatgtcgccccattccgcccatgaaccgtcataaatcagcacgtcttcagcgccaatcaggtgcagaccaaacagcagtgcggcggcggtaacgcctgaaccacagctggagatagtgcgttgcgtagtatcaaccccaagacgcgagaaggtctctttcaatgcctggggtgattttatccgaccgttttcagtgagttcggtgaagggtacgctgaggctaccgggaatatggccaccgtgcagtcccggacgcggctcgggctgctcgccctgaagcgtcccagagaacgtgcatcaataatttgcaccttcccgagtgcctgcttgacctgttcggcgctgacgaccacttggctctccagcctggcctcgaagttggcgggaggcagcttacgctccccgccttcagtccgcttgccttccttgagccaggcgttgaggccaccgtccagaatacgcacgttgtttgcgccaaagcgagtcagcatccaccacacgcgcggggcgctgaacagatcaccttcgtcgtagagtacgacagcgctgttattactgattccgcgttcgctcattgacttactgaatgcttcagcgtcaggcagcatatgcggcaggccagtgctgcaatcagaaatatcatcaacctcgatatagactgcgccaggaatgtgcgcctcaaggtatttaccatgaaaatcaatgggcgggttaattcccggcttagacttgcggcagtcgataatcaccagacctgattgatcaagatgtgaagccaaccagtcggttgaaacgatagatgaactcattattcctcgatcctattctaatagtggtagtgtcgacattacgccagatcgccggggatcagtgagtaaatccacgcgttgctgggctgtccatgaaagtaaagcccgttgcgatgcagtccttctttgaccgccccagacttttcggccactcggcagctgcgatgatttttttccatggcaactatctcgagtctcgtcatgccgagctcgttaaaggcaaaacgggcaatggccttcactgcggtcacagccagcgatcttccggtaaaatcactgcgtatccagtaacctatattggcggttttatattcgggaacaatacggttaagggctatagagccaattattttaccgctggcgaggtcaaaaaggcagaagcgatactcctgccctcgttgcctttttacataggagtcaatgaggtaagttcggctgtcttcaaggctatagccggtggaacaccagctttcccatgcggaaatatctgccattgaagactgaatagcatcaaagtgcaagggcgcttccaattctgtcggtacgcgtatctccatgctctcatcttgataaatcagacggctcgtcatttcctttctctccctcattactcgcctcctcggcgtgagattcagactcacacattcactgagataatgtcaatcgagcgatgcacaacgcggaagctgcttatgaatcagaggtttgctcgaccagcatgaccagttttaactcattgctaccggccgggaaaaaggtttgttgcagataacgcaccggcccttgtgaagggtgcatgaacagccgttctccgccttcacgcgccagcacttcctgctgcatccaccattgattaaatacgctgctttcttcacgcaggctcagcaccgtttggcgaatctcatctaagtgggcgtagtgactggtttcggcacgaaattcggcgacgatgcgttgcgcacgcgcctcccagttgactaacagcgtgcgcgccaaggggtgaatgaacataaaccgcaacaggttaggacgatcgtctcggtccagccagccgtaaaaaagctgctcggtttgggcattccaggccagcatattccagcagctgtccaacagataaccggggcaattgagctgatgcacgcactgagtgagaggttcgttcggcgagcgcacgggcgcgtacgcctgcggatttttgatgccggccagactgaaaaggtaatcctcctccgcaggctgtagacgtagcgcctgcgcgagcctgccgagcgttgctgctgagatggaaacgtcccggccctgttctatccaggtgtaccaggtggtgctaataccgctgatttgtgccaactcttcacggcgcagcccgctggtgcgacggcgcgttgagtgcggcagtcctaccctctctggtgtagttttttctcggtgagcgcgcaggaacgcgcctaatgcctttgggccattcaaaggttctattgtcgacattgttacgctcatcaggctaacaggggaactgcataatactagtataaatgctcatattgtacccgtataaaacccgatatacagtgttgttaagccagacatcccatgattaaaaggaatataaatggacaataaaaacagccatgcgcaaagcgtcagcgagcagttcagcccgaatgcccaaaactatttaaccagcgcggtgcatgcccaaggacctgatttgacccggctgtctgcgctgctcacgccttactccgatgcgctggtagtcgacctgggatgtggcgcagggcatgccagttttgcggtgtcaaagtcagttaaaaaggtcattgcctatgatttgtcggccgaaatgctggacgtggtcaagcatgtagccgcagacagagggttgaaaaatatcgaaacccggcagggttatgccgagtcgctgccctttgaagatgcaagcgttgatgtggcgatcagccggtattcggcacaccattggcacgacgtaggcgcggcgctgcgtgaggttcgccgtatcctcaagccgggcggtaaagtggtgatgatggatatcgcctcgccggggcacccggtgctcgacgtgcatttacagactatcgagaagctgcgcgatacctcacacgtgcgtaattattccaccggcgaatggttgcaaatgtttaatgaggcagggatccgtatcgaatctttaaccaccggcaagctgacgctggagtttagcagctgggtcgctcgcctgaagactcccgagcattttgtggtggctattcgcgagctgcaaaaggcgtcgtcagaggaggtcgtacagtatttcgctatcgcacaggacggcacttttgagactgatacgctgttcatcgaagcgagtaaaatctaaacaatgaaaacgggccggtttctggcccgtttctcgccatcgcgttatttcttaaacagcttaccgccgagcatcaccacggccagcaccagtgcgccgaccacaatgcccacagccagatcgcttgcgccggttatcagtgagtttacccagccctgatgccctgtcgtaaagccttcaagcaggctgtgcatgaacggcaggccgtggctaataatgctgccaccgaccagaaacatggcgaaggtgccgacgatagacagcgttttcattagcaggggagccgcgttgacgatgccaccgccaaatccgcgcactgcgcgcatgaatccgctcttgccgctgagcttgctgaggtaaagtccggcatcatcaattttcacgataccggctaccagcccatagacgcccagcgtcatcacgacggctatcgcacacatcaccataacctggtccagaaacggtgcactcgatacggtacccagcgaaataacgataatttctgccgaaaggatgaagtcagtacggaccgcacccttaaccttgtctttttccattttcgccagtgcttccggggactggcttgccgccttaagcctggcctttttttccgcctcagccgcttcgtcatgcggcataaacttatgcgcgactttctcaaagccctcatagcacagataggcaccgccaatcatcagcaggggcgttattccccaggggcaaaggcgctgataagcagcgcgaggggcacgagaattgccttgttgagaagtgagcctttggcgacggcccagacgattgggagttcgcggtctgctttgaccccggagacctgctgggcgttaagcgccagatcgtcaccgagcacgctggcagttttctttgccgcgaccttactcattgcggcaacgtcgtcaagaatagaggcgatgtcgtctatcaacgccaaaaggctggttcctgccataaaagctctcccgggaggttatgatttttagagatatgtttttagaatttctatcgttaaaagaatcatatcagcgattgctataaagcgtcgattcgtgcgacgctgtcccacgccgttaaatcgctattttagtttcttccctgtgcaccattggcgcgcttttttattacatttcctccttaattgagcctcgtgaaataatttttagtctttcctcctcattttcgccataaagcttgaacaactttactccccatgactccgcctttcgtttaatgaacgataattaataccaaggagaacatcctgctcactaattatcgtcaggctatccgacactgtttagccataaaaacgtctaaggcggaaaccatgaaaattttacctctcattgcagcagcactgtttgcgaccgcgtcattctcttctctggccgcaacggaaattaacgcagcccaggcacaaagtaacaattatcaatcactcggcgtcgttgacgtagctcaaggcaatactgaagacatgagtctgaaagctgcggtgaatgcgaaagccgcacaggaaggggcgactcactatcgcgttatcggggtaagcactccgggtgactcaagcctggcccgcgccagcgttgagctttaccgttaagttcagttttttacgattaccaagaacagaccgtcgagtgtggggactaccctcaaacagaggttgcgccagcggcttctgtccccagtgtctcactcgacggtttccttttacctgataaatttagcctgcctgtaaactccctcatcggctttttttccttattttaaattttccgctatattttctatagccattcaatcgattagttctgctattatcctttactccgctcgaaagacttattttgcctaacctcaattaatgaaaaggagagggtagagttatcttttgctaaatcatctgaaaatttccatacatcacaggaattaagacgtttcttatttagaattaatttaaaaggattttttaaaataattaacgcaaataattattccttaagaatttttcgatgtgatagtggtctacatccccagggggttataaatatgttgaatgcgacaagactgactatcaatgcgacaaggttgaccatcaaaaatcagttttcctatttgcagaactttatctcgtcgccgcgcaccttcgggacgctggcgccctcatcgccttggctgtgtcagaccatggtgaatcaggtcgactggaccaaaacgttgaagattgccgaatttggcgcggcagacggagtcctgaccaagcgtatccttgataaaatgcgcgccgacgcgcaggttcaggcgttcgagatccagcctaacttcattcataaactgaatcttatcgaggacaggcggttgcaggtaatgggctattccgctgagcatctggaaggcgactttgacgccatcttctgctgtctgccgctgttgtcgatccccacgcgggtgagcatgaagatattgcagcgcgctcaacagcgtctgagagaaaaggacggggagcttattctgtttcagtacagccatctgtcagagaagctactgtcacgctatttcagctggaaaaaattcgtgtagtaaaaaactttccaccggcattggtgtatgtatgtaagccattataatataaaggttattgatgtaatattttctttacaccatgtttacagggattgccaatttattttttatcggtatgatgccttaggttcaaagatgtctctggcacataaggatagcggtaatgacgcaacccattttcatgataggcgctcgtggcgcaggtaaaacaacggtcggcagagccctcgcgcaagcgttagggtatgattttgtcgataccgatatttatctgctccaaacttcacaacttagcgttgcggagattgtagcccgtgaaggttggtcaggtttccgtcgtcgtgaatctcaggctctgcaaaatattagcgctccgcacaccgttgtcgcgacgggcggggcgtaatcctgtctgccgaaaaccgccagttcatgcgcgagacaggccaggttatctacctgcgctctccggccagcacgcttgcacaccgccttgaggactcgcctcaggaagatcagcgccccacgttgaccggcaggccaattaacgaagaaataactcaggtgctgaacgagcgcgaagccttataccagcaagctgctcatttcgttctcgatggaacgcatacgccttcgatggtggttgaggacatcctcgacgcgctcgccctgcagctcgcccgctagttaccccgccggtttttaggaggcttctgagcctcctgctcactgtaaaagcccctcgttgtctatacttaagtcaccgagataatttacaggagttccttatgccttctaacccccttatccacgtaaagctgaaatcattaccgttgagaaaggactgccgggtcaaacagaaatctggtacgaattacgcgccgaccatccaaagcctgataccctgattagcgaacataaatcgaagaaagaggccgaggattctaaacgccgctacgaagatgaagacatcagctaaaggccaacgcttttcccaaaacacattagccacgctgtacgatgatgattgccccgacgctgccctgttactagagcagcgtcttttaaaatatatcgccagcgaaacgtttctccgaaattcggagttatatactccatttttggcctttagtgaaatttatcactaaatcatgttttgctggcgaacaaaatttcctctatctgcgtggtgaaaactatcatccgctggtttctccccctgctaaaaaataaacaacttgacgctttaacgtatcggcattaattttcattcatcttaatcaggaactgagttcctaatagtggaactttcgccgtgacaacacttgaaaacgcttccgcagtcttaaagctattcgcgcaaaaagggataaggcagggtcatccaggtctttcttttagcgacgttgtcgagcagttggggttgccaaagagcacggtgtctcgtttgttgatgaccatggagacgcagggcttgcttgaacgcgacccggaaacgcgtctgtacaagattggaaagctgctgttggcggtgtcgagtcattatctttctacgccgctggtagatgcctgttcgccgtacattcagcagctgagcaagcaaactcagtgcaccggctacatctcgatgctggaaggtcgggatatcatggtgatgcggatgtttccgggtcgcacctatcttcaggtcgtgacaccggccgggagtttactgcctgctgcagaaacggcgataggacgagcgatattagcgagacagactaaccaacaggtgatagataggtatcgcgaagggtatcgggtgagttcacctaactcgccgcagacccttgaggcgctgctggcgacgcttgccgagattcgcgaaaagggttggtcatttgctaataacgagactttacaagggattagcacgttagcgacgagcatttctaataagcatcgtaatgaaaccgtgggcctttgtttgtcttttccgtcgccgttcgacggcaatgatttgcccgccgaaatacgtgaaggcatcgtggcagtgacgcgccaggtagcagagaaattaggcgatgagtattggctatagaccaataacgggccgtaagaaccataaaaaatttgaccataaaagagcgcaaatacttatataaatcatagcgccaacaccaggaaaccattgcattttcgccaacatcaggggactttatgacaggcaatactgggagtgacagcagggtgaccgacgggagttataatccactaaaagagatcggcaccctggctgtaatgattctgctttcgattttaggcgccattatcggcgtccagctaattaccactctcggcgttacgcctaatacctcaatcatcggtgcgctttttgcgatgttgctggcacgcatcccgatgaaagccttccagcgttatcgctctattcatacccaaaatctcgcacaaaccgttatttcttcagccacttttggtgcggccaacagcctgctgatgccaatcgctatcccttatgtgatggggcagccgcagctgattctgcccatgtttttcggcgtttctgccgcgatgctactggatgcctacctgctttaccgtatgtttgacactaaagtgttccctgccagcaatgcgtggccgccgggtgtggcagccgccgaggctatcaaggctggagacaagggcgggcgtgaggcctggctgttggtcgttggcgtggtggtcggcctcggcggtgcgatgctcaagatcccgatggcggcctttggtaccgcatttatcggcaacatctgggccttgggcatgttcgggataggcctgctgattcgcgcctatgcgcaaccgattgccggtgtcgatatcaatgccttgtatattccacacggcatgatggtcggcgcgggcctggtgtcgctgttccaggttattcaggtcattcgccaaaaacgtgcggatgccaaagccacctttacccagcccggtaatgaagttcgtaaggcgctgggactcggcgcagtgggctatatcgcgattgccgcggcgctggcgctggcgggcggtatttataccgagatgacggtgagtatgttgattggtttcatcatctatgccgccttcgccgcgttcttccacgagcttatcgtcggtatcgccgcgatgcactcaggctggttcccggcctttgccgtcgcgcttatcacactgattgtcggcatcctgattggttttccgccggtcgcactgtgcatcctcaccggctttaccgccgcgacggggccggcctttgccgacatgggctttgaccttaaagccggctttattcttcgcggctatggcaaagacttgcaggtcgagcttgccggtcgccgtattcagcttttcgccgcattgattgccttccttatcgcgattccggtggtgtggttcgcccacatcggctatttcgcgcaggacttggtaccgccggttgcacgcgtgtatgccaaaactattcaggccggtgcacagccgggtatcgctcacagcctgctgatttgggcgattccgggcgcaattatccagctgatgggcggacctaaacgtcagcttggcgtactgctggcaaccggcctgttgatcaacagcgtaatggcgggttatgcggtcgtgctggggatcgtgctgcgtatccttatcatccgtatctggggtgagaaggggcgtacgccgatggaaattctggccgcaggatttatcgcaggagacgcactctacagcttcttcagctctgttttcagcagtaaaggcaagtaatcagacccaaagatattgtgctaacaccagggctcccatgagccattattgataaataaactggccttctaagaaggtcagattaacgcggttgttttggttattgcgcagcgttgcgtcaaccgcgttgttgctgaggaagatgtcatgagtttgctacagacccttaccgtatttgaactgatcgacaatgcgcacgtcagcggccaggatatcgtcgacctgtttgccgactatccttccgtgaccgccagcacgcatcgcgcgtctggtgccaagggcgcaaccgattttatccgcattaccattccgggcagcgccggtaaaagcctggggggcgatgcgcctacgctgggtatcatcggtcgtcttggcggcatcggtgcacgcccaacgcgcattggtctggtttctgacggtgacggcgccatcgctgccatcagcagtgcactgaagcttgccgatatgcaacgtaaaggcgatgtgctggccggtgacgtgattgtgacgactcacatctgtcccaatgcgccgacgcgtccgcacgatccggtcgactttatggactcacctatcgatgatgtgaccatgaacgacaacgaagtggtcgacggcgtggatgccatcctttctatcgataccaccaagggtaaccgtatcatcaaccataaaggttatgcgctttctcctacggtgaaagaaggctatatcctgcgtgtgtctgaagacctgctgcgcattatggagatgaccagtggccgtccggcggtgaccttccctattactacgcaggacatcacgccttacggcaacggtgttcatcacctgaacagcattctgcaaccctcgacggcgaccaccgtgccggtggttggcgtagcgattaccgctgaatccgtcgtacccggttgcggtaccggtgccagccatgaaacagacattgctctggcggtgaaattcgccgttgaagtggccaaagagtttggacgcggcacctgtcatttctacgatgccgacgaatatcaactgttgttgtcgctgtacggaagcttgcgtcacctgcaaagcagagactaagaagatgatgacctccttcgctaccctgaccattggccaggcaccgcgcagcgacataatgccgctgctggacgaatacctgccgcctgacatggtcacccataccggactgttggacggactgacgctggcacaaatcgagcaacgtttttccccagggccgggagaggacgtgctcgtgtctcgcctgttggacggcactcaggtcaggctcgcctctccgcgcgttgagcaggcgttgcagcagaagattgactggctggaaagcgaaggatgcaacaccattttgctgctctgcaccggcgtgttccataacctgcgtgcgaaagaggcgatgctgcttgagcccgacaggatcattcctccgctgatcaacggcattgtcggtacgcatcaggtggggatagtggtgccggtggttgagcaaatagaacatcaggcaggcaagtggagcaagcttagcaaaaagccgtgctacgcgaccgccagtccttatgtggccgacgagcagacgcttatcgaggctgcgctgtctctgaaagagcaaggggcacaggtcgtgctgctcgactgcatcggttatcagcgttcgcactgcgatattattcagaagcagctcgacgtgccggtcgtgctgtctaattcgctggtggtaaagctcgccgccgaattgctttattgatatcgcacaatttcacagagtcgcacctgcagaccgcaaaatcaatcagcccgttgccgctttgcgggctggctcgacagacgcttacgccgcgataaaaatcagtgacagaagcttgcctctgcccataatatggagtttctaagtttttgaatatttatcgcgaaggacccatctttatgttgaaaaataatgagtattttgacgggaaagttaagtcgattggtttcgacagcgacagcctcggcgcgcttagcgtaggcgttatggtgaagggtgagtacacgttcgggaccggcaagccggaagagatgaccgtcgtgagcggttcattgaccgttctgctgccgggttcagaaggctggcaaaccttcaccgcgggtgaaactttttatgtgccgggcaacagcgaattcaatctgcaagtgcctgagaccagctcttacctctgcaaatacctgtctaaataaaaggcttcgctccggctaacctttttacttgaatgagttgcgcgccaatcatctcgcgcaactcatcgtgtgagcgtcaaaattaacgctgcgcttctccgcctaaagcctcaatcagattcgcaatcagtgccgccaattcgccggtcattagaataaagtcggcatcaaaacgcgctgcaaagtcttcacgatcgatatcgtcattctgttcgcggattgtatcggcaaacttcaggcgcttgatgctgccgtcatcggccaacaccacctgaatacgctcctgccaatcgacagccagcttggtgaccaacttgccgctttcgatgtggttggcaatctcgtcgctgaccagcgcctgcttcttgcagcggatcactccaccttcttccagaatcgctttcagctcagcttcgtcctgcagggcaaaaccggccggaggttcgcctgaacgtacccattcggtcagcgtcagttcaatagggctttccatggtcagcgggactaccggcagcgagccgaggctcttacgcagcagcgccagcatgtcttcggctttcttggcactgcctgcatccacgataatcaggccgttaacggtatcgagccacataaaggtctggctgaagcggctgaaggcgcgcggcatcagcgtgtgcagcacttcatctttcagcgagtctttctcggtctttttcagtttacggtgctgttcaccttctatctgatcgatctttgcattcagctcttgcttgaccactgaagaaggcaggatcttggcttcggtgcgcgcacagataaggatctggccgccgctaacgtgggtcagggcatcgccgccctgagaacccatcggcgaaacccagccggttttcgccatatcctggctgccgcacggggtaaaggtaaatgcgctaagctgtttttccatctcgtcggcagacagtgagatttcacggcttaggcgataaaccagtaaatttttaaaccataacatgatgttatccctgtcttgtcacgctcgcagcgtgctattaaatggtaagcagggcggcatgataaccaattgagcggcatcagtccctaagaaaaattcgtagcctgtgaggttgagcatcccgagccttttaagagcacttaccccccgcagtgtgatgagtttgttataaactgaagaaataaaaaaaccggcaatggagaaatattttgcgtataggaatcgatctcggtggcaccaaaattgaagtcatcgcgttgtcagatgaaggccatgagttgtaccgcaaacgtgtggatacccctcgcaacgactacgaaaaaacgctgcacgcgattcagggactgattaacgacgccgaaaaggcgaccggccaccgtggcagcgtcgggttgggcattccgggcacgctttccccgttcaccggcaaagtgaaaaatgctaactcggtgtggttaaacggccagaaactggatgaggatttggcgctgctgctggggcgtgaagtgcgtatcgccaacgacgctaactgcctggcagtttccgaagctaccgacggcgctggcgcgggtaagaaaacggtattcgccgtgatcatcggcactggctgcggttcaggcattgcgttgaacggcgaagcccacgcgggcggcaacggtatcgcgggagagtgggggcataatcctctgccgtggcaggacgaagatgaaatccgcttccagcaggaagtgccgtgctactgcggcaaatcgggctgcgtggagacctttgtctctggcaccggttttgccgaggactatttccgcctttccggccagcgcctcaaaggttctgaaatcatcgagctggtcgagcaggacgatcctgtggccgatctcgctctcggccgctacgaacgccggctggcaaaagcgttggccaacgtggtgaatattctcgatcccgacgtcatcgtgctcggcggcgggatgagtaacgtcgacaggctctaccacacgttgcctctgctgctcaaacagtgggtattcggcggtgagtgtgaaacgccaatccttaaagcggttcacggtgattcaagtggcgtgcgcggtgcggcctggctatggccggaagggcgcttctccctgtaacgtttcctgcaaaaaccaaaaggcctgccacgttcgcaggccttttaaatttcaacgcagattaatcccctgaaagcatcgcatccggtgccgccgcgttgcgctgtgccttggtcgccccgaagtagaggtaggcgaccagcataaagaccaggaagataccggcaatctccagattgaaccataccatcgcaataaggcataccaccgccagacaaagcgcaatggctggcacaacaggatagcccggtgcgaggaagctgcgggccagatctggggcggttctgcgcagcttaaacaggctgagcatgctcatgatatacatcacgatcgcgccaaacacggccatagttatcatcgccgccgtcagcgacatgccctgtaaattcaccacgccgtcgctaaatattgccgcgataccaattacaccgccaagaattatggcgcgatgtggcgtctgaaagcgcgacagtgtcgccagtccggccggcagatagcctgcacgagccagcgcaaagaactggcgcgaatagccgagaataatgccgtggaagctggctaccagcccgaacagcccaatccataccagcatgtgcatccagcttgaatgttcaccgaccaccatcttcatcgcctgaggcagaggatcgttgatgttggcaagtttgctccagtcgcctgcgccaccggccatgatcatcacgccgatcgctaacacaaccagagtaaggatcccgctgacgtaagctttcgggatcgtacgtttcggatctttcgcttcctcggcggccatagcagcgccttcgatagccaggaagaaccagatggcaaacgggatcgccgcgaaaatacccgacaccgcaggcagtccgaagtgttcgccgccggaccagccgttgagcacgaaattgctgatgctaaagccgggagccaccaccccataaacaccagcagctcaagcactgccagcacggtaaccaccagttcaaacagagccgcgagcttgacgcccagaatatttagcgccatgaacagcacgtaagcgcccagtgccgcaacttttgggttgaggtgtgggaactgcacgttcagataggcgccaatcgccagtgcaattgccggtggtgcaaacacgaattcaatcagcgtcgccatcccggctaccaggccgccggtctcgccaaaggcgcggcgactgtaggcgaacggaccgccggcgtgcggaatggcggtagtcaattcggtaaagctaaagataaagcaggtatacatggtggcgaccaacagcgtggtcaccaaaaagccgagcgttccggctacgccccagccatagctccagccaaaatattcgccagaaatgaccagtccaacggctatcgcccacaggtgcagggtgcctagcgtcggtttaagctgtgttgtcatgttgctctcctgaagataaatgaacggcacgcccgcccaatcaggcggaaaaaaatcagtacattttgcgcagcactttctccaggctttcgaccaggatcaggctgtgctcggcggtgaacaccagcggcgggcggattttcaggatattggcgtgtgggccagaagcgccgatcagtacgccctcctcacgcagtccattgaccacggcgagcgcggtttctgagtctggtttgccgtccggcgtggtgaagtcaacgctgacaaacagccccgcgccgcgcacgctgccgatggccgggaaacgggtcgccagttcgctgatgccgtcgaggatagccttgcctgcacggccgacgcttggaataagctcttcctgttcaatcacttccagcaccgccaggccaactgccgatgacacggtgttgccgccgaaggtattgaaatagctcgactcgctgccgaagcgctcgaggatatgcggtttgatagtgatgccggccatcgggtgtccgttgcccatcggcttgccgaggctgacgatgtccggcagtacgccgtgacgctggaagccccacatgtgttcaccggaacgaccgtagccaggctgcacttcatcggcgatatacagcgcgcctgccttgtgaatctcgtcgatcgcttctttcaggaaaccggccgggtcaaagaagccgccgtcgctggtgaagaaggtatcaatcatcaatgccgccggtttgatgccgtggcggtgcatatcggccagcgccgcgcgaacgtcggcggcaaacttcttgcctacctctgccgggttggctgggttatgaatcggcgcagggataacgcgggcatcgccgttcaccttgacgtaaggacccatcgaggctgaaaggccggcgatcgccttggtcatgccgtgatagctaaattcggtgacgatcacgccggtcccgccggtgaaatcttcggcgatgcgcagcgccaggtcattggcttcgctgccggtacaggtaaacatcacctggctcagttcagatggcatggtcgaaaccagcttttcggcgaagttaagcacgttatcgtgtaagtagcgcgtgtgtgtgttcagagtagaagcctgacgaatcagcgcctcgagtacgtaagggtggcagtggccgacggaaggtacgttgttgtaaacgtcgagataacgtctgcccgccgcgtcaaatacccacacgccttcaccgcgcaccagatgcaccggatttttgtagaacagctgataggcaggaccgagcaggcggcggcgacgttcgatcatctccagcgcttcgggtgaaacgtctgagctggatgcggcatcaaaggcattagttttcagcatggtaggttctctcctgacggatacgattcgatttttctccggctgacccctgtcatccggcgagtgaagttgtttcgataatgcaccgcgttacctcacaaaacttgaccgcagcgcgctcagtcctgcacgccagagtcaagttgaccgctcgacgccgaatttgatgtgctgaagtcaacaattggccgtcccgggtcaagcgaagaaccgttgtcgctcgcattctgatagcacaaccccctatttgagctgcccggagtgaaccctgatgaatgcaaaacagtctgataccctggacaacgccaacctgcaacagctcgctgccaaggcgttaacccgttatcccgatgcgctacagggtgaactcgccctgatctgccgttcagaaaatgccacctttgtcgtgaagcttgccgacggcaatcgtctggcgctgcgcgtgcaccgcgacgactatcaccagcgtaacgagatagagagtgagctggcgtggctcgacgcgctgcgcgaaaccggcattcaggtgccagaagcgctggtaacgcaagacggcgagcgtgtgcagactttgtcactgggcgaaggtgccagccgccacgtggtgctgtttaaatggattgaaggggagatgcccaccacagagatcgatccgcgcgcctttgctcagctcggcgaagtgacggcacgcctgcatcagcacagccagcgctggcagaaaccgagcgggtttaaacgtatcgtctgggaccaccagaccatgaccggcgaaaaaggccactggggacgctggcaggatgcaccgggtctccagccgaaagaccatccgatcgtcgaggagaccctgcgccgcgttagccgcattctggaaaaatacggcaagagcagtcagcgctatggcctgatccatgccgatctgcgcctcaccaacctgctgctgcacaaaggagagacgcgggtgatcgacttcgacgactgcggcatgggctggtacatgcacgacgcggcggcggcgattagtttcgtcgaacatcatccccgtgcgtcagagtgggtggagcactggttggcggggtatcagcgcgtctgtgccctcagtgaggactgtttggcggtgatcccgacgatgattatccagcgccgtattcagctgctggcctgggtgggatcgcacgcgacgaccgagatggcgctgagtctgggcgataattgggtcgccgacagtttgaaactttgccaagcctacctcgcaaccgagcagtgcgcgctggcggtgagttaagcgtaatttaacgacacactgcacggtttgcgtgcagtgtgcactttcccttgatatgccagcaaactccccttaaaccaccgcaccggctaagtgcctgaccttaaagcccctgattttttcctgataattctttctctggtatgaaaattgcagcaaatcgtctagacaaattaaccacagtggaaacgcgtatgcagattgacgtattgcggcagtcaaccttgtcaggctacacagaggctgagatgaacagcaatcgcggcgtattggctgcggcggccagtgggctgagcgattttattattactaaaggggccgacgtggatcgcgtgctggggatctgccatatcgatcccgagcttttgcagcgtcccaccttgagtctcggcctgaccaactattgtcaggttctggaggaggcggccaggcagtcgggttgtgataacttcggtttgcattacggcaggcaattcaaaccacagtcattaggcttgattggttacattggtctttgttcgtcttcggccgaaaccgcgttgcaaaacgtggtgaacgcctttccgtttcatcagcacaatacgctgacccgtttggtcgacaagggcgagtattaccgctttgattatcaggttcgccacggcggcatcctgtgtaaacgtcaggacgccgagttgacgctggggatgatcctgaatctgctgcgccatggtttaggcagaaactgggcaccgcgcgaggtgcatttcgagcatccaaggccggagcagtggcacgagcactgcaagatcttcgacgcgccagtctattttgatcaaccttataactcgctgatcatcgccaagcgggatcttcagcgatcgatgcccgagcaggatcaaacgttgctgctggtgatgcaggatgctatccgccgtttgaacgccgacaatctgacgcagcagtcggtggtcgatcgcgcaagatcgcaggtcagacagaatttgaccctcggcgagccggtgctcgacgacgtagccgacaagatgggcatgtcacccagctcgctgcaacgccggctgcgtgaacaaaacctgacgtttaccctgctggtggacaaggtgcgctgcgagctggcaacgcactatcttcagcaacagcagctgccgatttcagagatggcactgctgttaggttactccgaggtcagtgccttttcgcgggcgtttcgccgctggtttggcctcagtccgcggcagtggcgtcaggaaaggcagcactaaattctctctcatggcgcagtccgctaggctgcgtgatgctcttcgcattgacagctgaagtttgcgcgccggcactaaacctaaactgtagggctacgagattataaattcggaacaataaaaatcgattaaacccctcgaatatggcagtctgctacgcttgacagcattaaatttatagcaaatctttgtgagcaatatgggaaattagcatggcgtcaggcttaattgggcgggatagatttaaccactatctctttattgtcgtagtagcgcttttaatctgtattttaccctccggctatacacatgaaaaaaccagcagagagattttctacctctgcagctatttatcaataaccggcatcgttataaattataaagaattcaaaggaatattcctctcttcacgttacgccttgccgctttttgccctcgcagcgctgtatgccgtctggtcactttttgcggtttatgtcaccactgacaaagcgaacgaatggctgttgttcacttcggccaaacgctggtttttgagcgggctgatagccctttatatctgttggggcgcgcgaaagcagcgactttcggcggctacgctgcaacgttgcgccttggcgtcgctatttgtggcctttgccgccgccagcgtttatggcatctggcaacatttcactgaccccgaacgcatcatcctcggcatcaaccgcgccacgatgaccgcctatgcctatagtgcgctggcgctgtcggtcatgacgctgattggccgcagctgcacctcgtcgaaaaaatatctcgctattctgctgatgtcgctggtgtcgttgtacgttattttcctcaccgagacgcgttcagcgatggtattacatctgctgctggtggtcctgctggtgctggcgatgctgtggaaggacaagaaactcaccgctaaatcactgagtatactgattatattagtggtagccgtcgtgggggtagggtcgcgctggtcgattgtacagtcacgctttgacgtcacgatgagcgagtatcatctctacgagaagggcgatgatcaaacctccttggggtcgcgctttacgatgtggaaaatggggctgataacctttgaacagcatccgttcgggcaaaccgagaccgggcgtaaccagcggatcgaacagtatttgctgagccataatcagccaaattcttgggcgctgcgttacatccaggttcacctgcacaacgagtttattcagactgcctcgctgtcgggtatttttggtatcgcgaccctgttgttcttcttcggtatgctgattttccgtaacggcatttcggggctgctgctgaatccggtgtctatggtggcattgtcggccttcctttatggattgaccgacgtgctgctgatttctgaagagtacattgtgctattttcaacgctgattctgctgtcggcgctgagttgccgaacagagaaagaaaacgcctgatgaaagggggccgccgaggagaattcggcggcccccgcaatgagctagtcgtttaccttgaacgcattgtccagccgactgatccctaatccatttactttcttcacttttatctgcaccggaatacggtctttcatcgcctcgacgtggctaattacgccgatggtttttccactggcgttcaggctgtcgagtgcgtccagcgcggtgtcgagcgtgtcggcgtcgagcgtgccgaagccttcgtcgaggaacagcgagtcgatgcgcgttttgtcgctgaccagatccgaaagcgccaacgctagcgccagactcaccaggaagctctcaccgccggagagcgtgcgggtatcgcgcactgcgtcggcctgccaggtatcgaccacttcaagctcgagtgcatcgctggttttgcgctgcagcaggtagcgaccgtgcagtttgtccatctgcctgttggccagataaaccagatgctccagcgttaatccctgtgcaaacctgcggaacttggcaccgtcgcttgaaccaagaatctgattgaggtagctccagtcgtcatacagctcctgcgactgggcaatctgcgtaaacagcgcccgttgcccggcctggcgctggctgtcgctctcaagctggctgcgcagttcgccctgacgctgctgcatcgttcgcagctgggcgttcaacgcggctatccgttccgccagggcatcggcccggctggtatgttgatcgataccggctgggcgcgactgaagatgctgttccaactgctcgctggcctgctgcaacaacgcctcactctggacttgctgctggctgagccggtctttcagcgcctgaagctgctggcgtaaagactcgtcaatcagtgccgcattaacggcctcttcatcggcaaacgcgctggacgccagcgcctgctgccactgagtttgcgcccgtagcaggtcggtctcgcactggcgctgactctgctgcaggctgagcacttggccgccgagctggtcgagctgttgctgcaccgcctgcaattgctcatgagcctgatggcgcgcccgttctgctgcctgttgctgttggcgcaggtgttcgcggacctgtttaacctgttgctcgccaaacaggctatggcgctggctgcgcagttgcgtgagtaactgctcactttcggccagtgtcttggctaactgctcgacctgctgctgaacctcggcatgctgcttgtgcagcgtcagagcacgttcgttttgaaccacggcctgttctttaacctgagcctgttcggcctgcgctgcgtacaacgcttccttcgcgcgttgaacggcctgcacgacgtcatcatgctgacggatcaactgctggcactgctgttctttttcttcacattccctgagccagtgttgcagcgcctcgccgtcttgcagggtaaagccaagggtcagtgatccgcaggcctgctgccactgttcgagatattcagcctgttgtttttcgtcctgttgtagggcgctttgtagccgtttttgctgctcaagcagtccttcggtgcgcgtgcgcagctgtgtgccggtggtctgcagtctgtcggtttcttcacgcattttctgtacgcgcagcgcagtttcggaggggctgactgcctgataggcctcgatggccggatgcgtcgtcgagccacacagcgggcacggacagccggtttgtagccgtgcgcgttccgcttcaaggctaacaatcagctgctcctgtgccagcagtttttctacatcgttgagatgctgtttctgctttttatactgttcgcgtgcatcgctaagctgcttttctgactcggtcagttcgttctggcgcgccgcgtactcctgccgctgcctttcgatacgctgcgacagttgttgatagagtggctgtagggttgaaagttgcaggcgcaccggacgcagcctggcaagctctgcctgttggctgcgcaaagtggcctgtggagactgagcctcgagcacgctgtgctgctgagtctgggcgtttaacgcggccttgagtgcttcttcagtggcctgaaactgacgggttttttccgccgacgccgcctgctcggacacccactttttccgcgactcgttcaacgcatgcagctgattttgctgcttaagatgagactcgcggtcctcgtttagcttcgcctgtaaagcctctattttgacgtccagcggttgaacctgttgctcaatcagctcttcctgacgctgcttctcggcggcctgctgttgctggttctctagtgcctgacccagcgcctgagtgagcgggtttttcgcctgttgcagctgttgttgccgttcactcagctgcgttatctgacgctgtaactcggtctgctgctgttgacagcgcgaccgttcgttgagcaacgggcggagcttttcggccggttcactgcgggcaagctgctcgagctgcggctgtgcctgctgtttttgctgcgccacgtcggcaacatgctggcggtactgttgctgcttttgctggttactttgccattgctgcaaccagttcaggccgtgctgttgcagtgccgtttgctgactcaattcggtttcctgcaggcccaactgcgcgagttcctgctcccgctgctggcgctgctcgtcgttcaacagttcgatacctgcggcgcgttggtgcagcaggtctagctcgacttttgcctgcttgtgacgctcgaaaacctgagccgacaggcgtccgtaaatctcggtgccggtcagctcttcaagcagttctgcgcgctcgttggccttggcattaagaaacgcggcgaactgaccctgcgagagcatcattgatttggtgaaacggccgaagtcgaggccggtcaattcggcgatagccggcagcttgtcgcggaccttatcagccaatatcttgccgtcggccaactgcgcgagttcgaccttggggcctgtaggttgccagtcggagaattccccgcgcggcgctggctccagaacgcccgatagccaacgcccttgacctcaaactccacctccgccagcgattcggcggtgtggcgggtcatcagctcattttggctcggcgagacgtcaaggcgcggcgtctggtggtaaagtgccagacagatggcgtcgagcagggtagttttccccgccccggtcgggccggtaatagcaaacagaccgttgctggcaaagggttcggcggtgaaatcgattttccactcaccttccagcgagttgaggttttttaggcgcagactgaggattttcacggcgcgacgtcctccgcagaatgaccgctctccacctgttcaagcacctgagaaaacagcgtgcggatgcgctgctggcgaccctcttcgggagcattttcctgcgccagacgccgttcaaagacttcggtaacgctcaactctttcaaggtctctttctcttgttgttgcaggcccagcaagcgctgctccttgctgcgccgcagcagtacgacttcgaccggcagcgggtcggtaagctgctgcacccgcccctgaatgtcgctgagatagtcctgtgtcgcgacctcgatatccagccagaccactttcccgttctcgaggccggcatacggcagcagctgtttttcgatttcggccagcgtccctttgataatttccatcggctgtgagcgaggaataaccagcgtctcgacggcgttgagcttatcggcggtgaaatcgagcaggtaaacgctcttttcattgctggcttcatcgaaactgagcggaatcggtgagccgctgtagcgaatatgctcagttttggcgattttttgcgccttgtggatgtgcccgagcgcaacgtagtcgaccggcgggaaggcctgcgcggggaatgcatcgagcgtaccgatgtaaatgtcgcgcactgagtcggaggtgctgacgcccacggtagtcaggtgcccggtggcgataatcggcagggcgccgccgagctcatcgcgcctgtcacaggccgcctgataaagcgaggcatagtgcgcggcgatggcctcctgcaacgccagctgtttctcgttgccggactgtccggcctggcttgaaagcaggtcacgcgggcgcaggaacgggatagcgcaaagtatcgccccggttgcccctggcgatttttcagggtcagcacctgacgcgacagatcttcgccgacggtggcaatcacctgggtattcaggcaggaaagcagctcgcgtgattcatttaaggtggcgacggaatcgtgattccctgccaggacgatgagctgacagcctgtgcgctgaaggtcgaccacaaagcggttatacaactcgcgcgcgtagcttggcggcgagccggtatcgaaaatatcccccgcgaccaccaccgcatctatttgatgttgttcaacctgttcaatcagccagttgagaaaggcctgatgttcgggagcgcggcttttggtaaagaagtactgaccgaggtgccagtcagaggtatgaatgagtcgcatgggggtctcgcggtggcggtaacaggcgacaagtataaacgccgagggtagtggctgtcgccgaaaaaccttttcaatgacaaatgcctgggtcaaaaataacgccttggctacacttaaacgcagcgtaaattcttttcataaatctgtcacaaaagtgacgcataatgacgcccgaaatcaaaattaagttcgctaacttatttggcaggctatcaaaatggctagacgcatattagttgtggaagacgaagcaccgatccgtgaaatggtttgttttgtgcttgagcagaatggttatcaggccattgaagctgaagatttcgactcggcggtcaatcgtctgattgaaccttaccctgagttaattttgctggattggatgttgcccggtgggtcaggcattcagtttatcaaacaccttaaacgcgaagcgctgacccgagatattccggtgatgatgctcaccgcaagaggtgaagaggaagaccgtgtgcgtgggctcgaagtcggcgccgatgattacattaccaaacccttctctcccaaagagctggtggcccgtattaaggccgttatgcgccgcatctctccgatggcggtcgaggaagtcattgatatgcaaggccttagccttgacccatcctcgcatcgcgttatggcgaacgagctggcgttggacatgggcccaaccgaattcaaactgctgcacttcttcatgacgcactctgagcgcgtctatagccgtgaacagttgctcaataacgtctggggcactaacgtttatgtagaggatcgcacggttgatgtgcatatccgtcgcctgcgtaaggcgttggaaaccagtgggcacgaccgcatgatccagacggttcgcggaacaggctacaggttctcgactcgctactaatacccttcatctttcatgttgcagatgcgcaggcaacatgaaagatattgggtaggcatctctatcactcacagcggagatactgtgtgttagaacgattatcctggaggcgtctggctggtgaactgtttatgttctgctgtcctgcgcttatcctcgccatttttattggttatctgccctggctgctgctggcttccgtgctggcggcgctgggttggaactattttaaccaactaaagctttcccactggctgtggctcgaccgcagcattacccctcctagtggactatggagctgggaaccgctgttctatggccttaatcagatgcagatgcgaaatcgccgccggcgacgcgagctggcgctgttgattaaacgttttcgcagcggggcggaatcgctccctgatgccgtggtattgaccaccgaagagggcaatattttctggtgtaacggcctggctcaggagcttctgggcttccgctggccagaagacaacggccagcacctgtttaacctgctgcgctatcctgaactgcgtgtttgggtgcagagtcgagattttacccgcccgctgacgctgcaccttaataatgagcactacgtcgagtttcgaatcatgccgtattcggaaggacaactgctaatggtggcccgcgacgtgacgcaaatgcgccagcttgaaggggcccgacgcaacttcttcgccaacgtgagccacgagctacgcacaccgttgaccgtcttgcagggctatctggagatgatggacgattccacgctggaggagcctttccgcagcaaggcactggacaccatgcaggagcagacgcggcggatggacggtttggtcaaacagctgctgacgctgtcgcgcatcgaggctgccactaatatcgatctacaggaaaaagtcgatatcccgagcatgctgggcatgctggagcacgaggttgctgcgctgagcgctggacgccacgaaatcgtgttcaagattaacgaacatctcaaggtgtttggcaacgacgagcagctgcgcagtgcggtatcgaatctggtgtataactcggtgaaccatacgccgcccggcacgcgcattgaggtgagctggcagcagacggcgcagggcgcacagtttcaggtcagtgacaacgggccgggcattgctccgcagcatattccgcgtctcaccgagcgattctatcgggtagacaaggcgcgttcgcgtcagaccggtggcagcggcctcgggctggctatcgtgaagcacgcactgagccatcatcattcccgtctggatattgacagtgaggtcggtgtcggtacccgctttatgttcacgctgcctaaccggctgatagtcactaacgcacccgctgagaaccagcgtgttaagcactgacgcttcccttaaacgggcctttgatggcccgttttctttttcactctcccgcaaaatgcctcgtcgatttcattcaaaatgaaatcatcacacgtgatcatgaatatttttcaagtgatgtgaaaattactcgttttgtgatgaagactattcatggcagcatagcctttaagccgtttagacatccagaagtctatatatcactcaaagtaactattcacattgtgaactaactcgccttgaccttgggctaccctttaattaattgcagcggcgtaacgcgccgaggcgtttgtcaggagttgaaaatgtcacagccaaacccagtctatcgtgccgaagttgttggtagcttcctgcgtccggaagcactgaaaaaagcccgtcagcagttcaaagacggtgaaatcgatgcgcagcagctgcgtgcggtggaagacaccgaaatccgtcgtgtggtagaacagcagcgcgaagccggtctgcaagtggtcactgacggcgaattccgccgtgcgtggtggcactttgacttcttcgaaggcctgcagggcgttgaaggttatgatgcagagcagggtattcagttcaacggcgtgcagactaaatcacgcagcatcaaagtggtcgataagattgcctttggcgaccacccaatgctggagcattttcatttcctgaaaagcatcagcggcgacgcggtagcgaagatgaccattcctagcccaagcgtgatgcactttcgttataaccgcgatgcggtaaaaaacgtatatccaaacctggaagactactttgacgatctggcgcaggtttaccgtgacgcgattaaagccttctatgacgcaggctgccgttacctgcagttggacgacaccgtctgggcctacctgtgctctgaagatcagaagaagcagattgtggcacgcggtgatgacccgcaggtgctggccaaaacttatgcgcgcgtattaaacaaggcgattgaaggcaagcctgacgacctgatcattggtctgcatgtgtgtcgcggcaacttccgctcaacctggatttccgaaggcggttatgagccggtagccgaaatcttattcggtaccgtgaacatcgaccgtttcttcctggaatacgacaacgaacgtgcaggcggcttcgagcctctacgcttcatcaagccgggtcaccagcaggcagtactgggcctgattaccaccaaaaccggtgagctagagcaggcgaaagacgtggaagcacgtatcaaggaagcgagcgaatatctagacatcaaccagatctgcctgagcccgcagtgtggcttcgcttctaccgaagaaggtaacagtctgagcgagaagcaacagtgggataagctgaagctagtggtcgatttagccgctaagatttggtaaagcttgatctttcgagctacagcggcgttcgcttccttcgctcaccccagtcacttactgatgtaagttcctggggatgagcttagtcgctgccttgctgtagctcgaaatctctgcgctttaatagtgcagggagatcaaaaacttggctattgcaaattgagttgttgcgtaatggttaagaatgcaccgcataattgtgcgtgaattggctataaattggttgtttcacgcacttttcatttcattaaagcttaaaatagtcatttgtcgctcaaaaaacatacgcatcatgtggtgattttgtgtctatatccagttaatctctctgttgtgccttttaaatccagttgatgactctgcttttgggatcaagacttgccttcatgcactataaaagcgtaccttagcgccgctgccactcgcacaacccctgcataataacgtcgttttttaacatatcgtcaggcgttttcagctcactctcgtacgttggattgggccacttgcgccatccagggttcagggattctcctcggaatttgagccgagtgtcagcatcggacacttttattcattttgcacaggcatcacgacatccatcatgagtcatcgtttaacaaccaaagatattctggcactgggctttatgacctttgccttattcgtcggcgcggggaacatcattttcccaccgatggtcggtttgcaggctggccaccacgtttggtgggcggcattcggctttatgattactgccgtgggcctaccggtcatgaccgtggtcgcgctggctcgcgtgggtggcggtatcgacgcgctgagtacgccaattggccgtaaagccggtctgctactggccaccgtctgctatctggccgtcgggccgttgtttgccacgccgcgcaccgcgaccgtttcttttgaagtcggtatcgctccactgaccggtgacggtgcaacccctctgctggtttacagcctgatttactttgtgctggtcatcggcatctccctctatccaggtcgtctgctcgataccgttgggcacgttctggcaccgctgaaaattgctgctctggctgttctgggtattgccgccgtcctgtggcctgccggtcagccactgcctgccaccgaagcctaccagacccagccgttctccaacggtttcgtgaacggttatctgaccatggacaccctgggtgcgctggtatttggcattgttatcgttaacgcggcgcgttctcgcggcgtgaaagacgccaaactgctgacccgttacaccatctgggcgggcctgattgccggtgtgggcctgctgctggtatacctcagcctgttcaaaatgggtgagaataccgcctccctggtgcctcaggcgcagaacggtgcggttattctgcacagctacgttcagcaaacctttggtggcatcggcagcttcttcctggcggcgcttatctttatcgcctgtatggtcacggctgttggcctgacctgtgcctgcgccgagttcttctcacagtatctgccgctgtcttacaagacgctggtatttattctgggcctgttctctatgctggtttcaaacctgggtctgagccacctgatccagatttctattccggtgctgaccgccatttatccgccgtgtattgctctgattgtcctgagctttacactgcgctggtggaatagctcgtcgcgtattatcgcgccggtaatgctggtgagtctgattttcggtatcatcgacggcatcaagacttcaacgtttgccaccatgctgcctgcatggaccacgaaattgccactggcagagcagggactggcgtggttaccgccgtccattctgatgctggtgctggttgcggtttacgacaaggtgtgcggtgagcgtaaagtgacagcgcatcagtaatgagcgctaactgtctgccatataatcagtggcaacagcgttgattaagctttcgccaatttaggccacggaattgtttccgtggctttttcgttggcacagggggatggaatttctccatcatctcgtttttagaccgcgctttatgatttggaatttttgaatgcaacactctctagatacacagtcggctgagacaccctcaacttcgcttaaacgcggactgagcacccgacatattcgctttatggcgttggggtcggctatcggtactggcctgttctacggctcggctgacgctattaaaatggcaggcccaagcgtgctgctggcttatctggtcggcgggattattgcttttatcattatgcgcgcgctgggcgagatgtcggtgaataaccccagaccggctcgttttcacgctatgcacaggattacctggggccgctggctggctacatcaccggctggacttactgcttcgaaattctgattgtcggcatcgccgacgtgacggccttcggcatctacatggggtctggttccccgacgtaccgcactggatgtgggtgctcagcgtagtgctcatcatcggcggtatcaacatgatgagcgtcaaggtgttcggtgagctggagttctggttctcgttcttcaaagttctgaccatcatcgtgatgattgcagccggtctgggcatcattatctggggtattggcaacggcggtcacccgaccggcatcagcaacctgtggagccacggtggattctttagccacggtatcatggggaccatactgtcattacaaatggtgatgtttgcctacggcggtatcgaaatcatcggtatcaccgccggtgaagcggaagacccaaagaaaaccattcctaaagccatcaactccgtgccatggcgtattttggttttctacatgggaacactgtttgttatcatgtccatcttcccatggaacctggtcgggacgcagggcagtccgttcgtactgaccttccagcatatgggcatcgctgccgccgcgacgattcttaactttgtggtcatcaccgcgtcgctatcggcaattaacgccgatatctttggcgtgggccgaatgctgcacggcatggcggtacaggggcaggcgcctcaggtgttcagcaaagtttcccgccgcggtacgccgtttatgacggttatcgtgatgatggctgcactgctggttgcggtgtacttgaactacatcatgccggaaagcgtgttcctggtgattgcctcgttggctacctttgccaccgtgtgggtatggataatgattctgttctcgcagattggcttccgcctcaagctgagccgtcagcagattgccgagctggaattcccgatgcgcggcggtatcttcacctcgattgtggccatcatcttcctgttcttcatcatcggactgattggttacttcccagatacccgtatgtcgctctacgcgggcggtgtttgggttctggcgctgctggtgagctactggattaaatcgcgcaacaaagccggataacggcgctaacacggcaataagaaagggaggtaagcaagtgcttacctccctttttaacatggcttatcgggtcatctatgttgctgtgattagggagcgcaccccatagcgcgcgcggccaatcagtaaccgatcgccgcgcccgccggacgacgtacgtcgttggcaccgtacagatagccttcgcgcacttttcccgataccgccgcatcattacccgaactctgcggggtcacgcccgccgcacccggcaacccgaccataatcagctccgctgctccccaaggggtctgctcgaccatcttgtagcccatcttctgcagcaggttgaggctgtcggccgacaccccgcgctgctcgtaatagacctcgtcaggcagccactggtggtgaatgcgcggggcgttgaccgcttcctgtggaggcatgccgtagtcaatcacgttaagcgccgtttccagcgtgatggtgatgatgcgagacccgcccggtgaaccgagaaccataaaggttttgccgtctttagtgattaaactcgggctcatcgatgatagtgggcgcttaccggggcaatggcgttcttgctgccctgcaccagaccatacatgtttttctcaccgaccttgctggtgaaatcgtccatctcgtcgttaaggaagaagccggtacccggtgcaatctctattgaaccaaacagaccattaatggtgtaagtggttgaaaccgcattgccgtctttatctacaatcgagtaatgcgtggtctcaggcttctcgtgcggttccatgccaggctgcacctgagaagaaggcgttgccttatcggcctcaatcttcttgcgaatatctgccgcgtagctcttgctcagcagacggtcgaccgggttcttcacgaacgccggatcaccgaggaaggtgttgcggtccatgtaggcatgacgcattgcttcagtcaaatagtgaatcgacgccgccgagttgaagcccatgctcttcaggtcgtaaccttcaagaatattcaaagtttcacacaacgtgacgccgcctgagctcggcggtggtgcagagacaaacttgtagccgcgatagctacaggtgaccggtgcggtttcagtgaccttgtagttggcaaagtcggcggcggtgataataccgccgccttttttggaggctgcctcgaccgcggccgggattttgcctttgtagaaagcgtcggggccacgttttgaaattgcttccagcgtgttggcgaggtctttctgaaccagtcgatcgcccggctgcaaaggcgtgccgtcttttctcaggaagattttcgccacgtcaggctggtctttgaacttggccgttttggtgtcgaggatgtcggtatcggcgcgggtcagcacaaatccttgacgcgcgagcttgatggccggagccattacctgggcgcgcgtgagtttaccgtattcacgctgggcgtgatccagacccatcaccgtgcccggcacgccgacggcgagataaccgtacaggctggcgccttttttgatattcccctgtgcgtcgaggtacatattggcgctggcagccgcaggtgccatttcacggaagttaatgaaagtatcttttccatcggccagatggacggtcataaagccgccgccgccaatattgccgcagcacgggttaaccaccgcttcggcatagccaacggctactgcggcatcaatagcattaccgccttttttgaggatatcaacgccaacctgcgaggccaggtattgcgaagtaacgaccataccatttttggcttcaactgccggggctgacgccgcgtgcagagcgccactcaccagcagtgcgcctacggttaatggtacggctaacggccttgcccagtgctttaaagacataacaactcctgtttataccctgtcagtgtgtttttttgaaaaaaacggatccaatgaaataacatcggtaagctcttatgttatttaacatttaaggaataaaggcaagcaggagtatcagcagaaaggcaaaagtgtggcggggcgaaaattatccgggcataaaaaaacggccagcaaggctgaccgtttcggtaaaaggggattggctgatgccgataatcgaaacgattacaggttaacagcgttctcagacaggtaagcagcaacgccagttggagaagcgtccataccttttttacctttttcccactgagccgggcaaacttcaccgtgctcttcgtggaattgcagtgcgtcaaccatacgcagcatttcgtcgatgttacggcccagcggcaggtcgttaacaacctggtgacgcacgatacctttatcatcgatcaggaaagaaccacgcagtgcaacgcccgcttctgggtgttcgatgccgtaggctttctggatttcacgtttgatgtcagcaaccatcgcgtatttcactttgccgatgccgccattctcaaccggggtgttacgccatgcgttgtgaacaaactcagagtcgaaagaaacgccaacaacttcaacgcctttagactggaattcttcgtaacgcttgtcgaaagcgatcagctcggatgggcacacgaaagtgaagtccattggccaaaagaacacaacggtggctttacccgcggtatgttttttaaagttgaagttttcaacaacttcgccgctgccaagtacagctgctgcggtaaaatctggggccggacgcgttaccagaaccataaaaactcctttctagtataggtaaatgaagaggggtgatgaaatcagcggtcagtataagggcaacgagtaggggaataaaccccatgggaccaatcgatcagatagcactcggctatcaactgtgatctagatctgcttctcgcgcgcctgttgcatcatttgcgggtaaaactgccagaactgtcgctctagctgggcatattcgcgctctacgtcataaaaagagcccgctaaggctgcgagcctcgggcgtcgattggccatgccttgtaatacatccttaataaaggataagtcagcatagcgctccatccagcgctgcggccagaggtagaggttaaggttacgaaaacgctctggggtctctgccaggtttggctcgatttgctgccgacactggttgataaagagcggcagcggcgtgtcagggcacagtttgtcccagtgcagcgacaggaaatggtcccatacgacgtcgagcgtgatgggcgcgacgcggcggtaatcggcactgaaaaactcgcgggcaactttgacttccggcagggagtcggtcatcacgtcaacgcgacgatgcatgcggataccgtcagtcaccgcgctggcataaagccctcggggttgccgcgaacgaagtcggccatcaggtttcccaatagcgaactgtcggccaatttggccagatgaaggtgtgcgagaaaattcattccggcagtataacgtctttatcctgaaaattaccccagggtttcctgatttattccggtgaaagcttgcaggggcaacccgctagctctagactaagccgcctgttttatcctgcaactctcatgcagcagatgcgttggccacgcccgctcaccctggtcactgacttgagtcacctcttggggaggggcgagtctgccgccttcctgcaacgcgagctgtctggataaaagattaatatcttaagttaatgtggaaatatcagctatgcgcgttgccgattttacgttcgaacttcctgagtccctgattgctcgctacccgcaaagtcagcgcagcgggtgtcgtttactgtctctggacggaccgaccggagaactgacgcacggtatctttacagatgtgctggataaactgaacccgggcgacctgctggttttcaacaatacccgcgttattcctgcgcgcgtattcggtcgcaaggcgagcggcggcaagattgaggtgctggtcgagcgcgttctcgattcacaccgcgtgctggcacacgttcgtgcctccaaagcacccaagccgggcgcagaactgctgctgggcgacgccgaaaacatcaaggcgaccatggtcgcgcgccacgacacgctgttcgagttggaatttaatgaagataaagatgtctttactctgctcgatgaaatcggccatatgccgctgccaccttatatcgatcgcccggacgaagacgccgaccgtgagctttatcaaacggtttacagcgagcgtttaggcgccgtggcggcgccgaccgctggactgcactttgatcggccgctgatggacgcgctgaaagagaaaggcgtcgagctggcgttcgttacgctgcacgttggggcaggcaccttccagccggtgcgcgtcgagaccattgaaaagcatgtgatgcacgccgagtacgccgaggttcctcaggaagtcgtcgatgccgttcttgcctgtaaggcgcgcggtaatcgcgtggtggccgtaggcaccacctcggtacgttcgctcgagagtgcggccaacgcctgcaaagacggtcttatcgcccctttctacggtgataccagtatctttattttcccaggttatgaataccaggtcattgatgtgctgatcaccaatttccacctgccagaatcgacgctgatcatgctggtttccgcgtttgcaggctataaaaataccattaacgcctatcatcaggcggtagcggaagagtaccgtttctttagttatggtgatgctatgttcatccaccgtaacccgctggcaccacaagaagtggtcggcgagtagttttttatctgcccattggtgggctatctttgggaacatccccaaaattatccaaaatatttcaacatgcagcccaccgcgcagcgtgttgaaagatagaggataaagctatcggactgtttttccggtgtggagaagaacgtgaaaatgaagtacgaattacaaactaccgatggccgcgcgcgtcgtggtcgtctggtgtttgaacgtggcgtggttgaaacgccagcctttatgcctgtgggcacctacggcacggtaaaaggcatgacgccggaagaagtcaaagacaccggcgcacagatcctgctcggtaacaccttccacctgtggctgcgcccgggtcaggaaatcatgaagcttcacggcgacctgcatgatttcatgaactggcatggcccaatcctgaccgattccggcggcttccaggtgttcagcctgggcgcaatgcgcaagattaaagaagagggcgtgcacttccgcaaccctatcaacggcgatccggtgttcctcagtcctgaaaagtcgatggagattcagaacgatctcggttctgacatcgtgatgatcttcgacgaatgtacgccgtatcctgctgactgggattacgccaaacgttcgatggaaatgtccctgcgttgggcaaaacgtagtcgtgatcgccacgacgaactgaaaaataacaatgcgttattcggaattattcagggcagcgtttacgaagatttacgagatgtatcgataaaagggctggtagatatcggctttgatggttacgctgtgggcggtttggctgtcggcgagccaaaagaggacatgcaccgtatccttgagcacgtttgtccgcagattcctgaagacaaaccgcgctacctgatgggcgtgggcaagccgcaggacttggtcgaaggcgtgcgtcgcggtgttgatatgttcgactgcgtgatgccaacgcgtaacgcccgtaacggacacctgtttgtgaccgacggggtggtgaaaatccgcaatgccaagcataaagatgacacctcgaccctggatgaacactgtgattgctatacgtgtcgcaattatagccgtgcctacttgcatcatctcgaccgttgcaacgaaatactgggtgcgcgcttaaataccatccacaacctgcgttattatcagcgtctgatggccggtttacgccaggctatcgaagaaggtaaattagagcagtttgtgactgaattttacgagcgacaaggcaagccggttccgcctttaaacttctgaggtcgagcaagagatcctctttctccttagagtaagaggatttgactgttcggcggcaaagattttttttagtattttattaacaacttgttttataacaacaatgagggaatttaaatgagtcttttcatttctgatgccgtcgcagctactggcgcaccgtcacagggaagtccttactctctggttatcatgctggtggtatttggtctgattttctatttcatgatcctgcgcccgcagcaaaaacgttctaaagagcacaaaaaactgatggactccatcggtaaaggtgatgaagtcatgacaaccggcggtctgatcggtcgcgtaagcaaagtagccgaaaccggttacgttgttatcgcgctgaacgacaccacggaagtgatgatcaagcgtgacttcgtggctgccgttctaccgaaaggtacgatgaaggcgctttaatttttgattttcccgaagggaactgccgtgttaaaccgttatcctttgtggaagtatctgatgctgatcttcgtgattatcgtcggactgctttatgcgcttcccaacctttatggtgaggatccggctgttcaaattactggcgctcggggttccgacgccagtgttgcaacgctggaccaagtcagagatgtactgaataaagataaactcgtcagcaagtctattgcgctagaaaacggctcaatccttgcgcgattcaatgacaccgacgttcagctgcgtgcccgcgatgccctcaccgcggcgctgggtgacaaatttgttattgcactgaacctggctcctgcgacgccttcttggctgaccatgctgggtgccgagcctatgaaactgggcctcgacctgcgcggcggcgtgcacttcctgatggaagtcgacatggatactgcactgggcaaactgcaagagcagaccatggacaacatgcgtagcgacctgcgtgaccagagcattccttatgccacggttcgtaaggccgacaactacggcgtggtgctgactttccgtgattccgcgacccgcgacaaagctgcaggctatctggcgcctcgccatcgtgacctggtattcaccaacagcggtgacaacgatatccgtatcgtgatgaccgatgaccgcctgagcgaagccaaagagtacgccgtacagcagaacatcaacattctgcgtaaccgtgtgaaccagctgggtgttgccgagccgttggtacagcgtcagggttctgaccgtatcgtcgtcgagctgccgggtattcaggacacggcgcgtgccaaagagattctgggtgcgaccgcaacgcttgagttccgtctggttaacaccaacgttgacgctactgcagcggccagcggacgtgtccctggcgacagcgaagtcaagcagatgcaggacggccagccggttgtgctgtacaagcgcgtgattttgaccggtgaccacatcaccgactccacctcaagtcaggacgaatataaccaaccccaggttaatatttccctcgacagcgcgggcggtaacatcatgtccaacttcactaaggacaacatcggcaagccgatggcgaccctgtttgtggagtacaaggacagcggcaagaaagacgctaacggtcgtgccattctggcgaagcaggaagaagttattaacgtcgcgaccattcagtcacgcctgggtaacagcttccgtatcaccggtgtgaacgatccaaatcaggctcgtcagctgtcactgctgctgcgcgccggtgcgttgattgcgccaattcagattgttgaagagcggaccatcggtccaaccatgggtgcgcaaaacattactcagggtctggaagcttgtctgtggggcctgctggcatcaatcctgttcatggtggtgttctaccgtaagtttggtgtgattgcgacaaccgcgcttatcgtcaacctggtgctgattgtcgggatcatgtccctgctgccgggcgcgacgctgaccatgccgggtattgcgggtatcgtactgacgctggcggtggcggttgacgccaacgtactgattaacgagcgtatcaaggaagaactgcgtaacgggcgttccgttcagcaggccatccatgagggctacagcggtgcgttctccagtatcgtcgatgcaaacgtcacgacgttgatcacggcaattattctgtatgcggtcggtacgggatcgattaagggctttgcaatcaccaccgctatcggtgttgcaacctctatgtttacgtcgatcgtcggtacacgtgccatcgtcaacatgctttacggcggcaaacgcatcaaaaagctgtctatctgaggagtgcgttgtggcacagcaagaatatactgttgaacaactaaactacggccgtaaagtcatcgacttcatgcgctgggacaacgtggctttctgtatctcaggcctgttgttaatcgcctctatcgcgattatgggtgttcgcgggtttaactggggtctggactttaccggtggtacggtcattgaaatcaccctgtctcagcccgctaatctcgacactatgcgagattcgctggcgacggccggtttcaaagacccgatcgtgcagaacttcggcagcagccgtgacgtggtagttcgtttaccaccgctgtcttccgacagtgccggtcaggaactgggtaacaaggtcatcagcctgattaacgccgatgttgacaaaaccgcgaccgttaaacgtatcgagtttgtcggcccaagcgtcgggagtgatctggcgcaggccggtggcatggcgctgctgcttgcgttgatctgtatcctgatttacgtcggtttccgttttgaatggcgactggcgttgggtgcggttatcgcactggcgcacgacgtcgtcattactatgggcgtgctgtcgctgtttaagattgaaattgacctgaccatcgtggcatctctgatgtcggtcatcggttactctctgaacgacagtatcgtggtatcggaccgtattcgtgagaacttccgcaagatccgccgcggtaactcttacgaaatcatgaacgtgtccctgacccaaacgctaagccgcaccatcatgacctcggcgaccacgctgatggttgtgctgatgctttacatcttcgggggtcctctgcttgcaggcttctcactgacgatgttgattggtgtgaccatcggtaccgtttcttcaatctatgttgcctctgcgctggctctgaagctgggcatgaagcgtgaacatatgctgcagcagaaggtcgagaaggaaggggcggatcagccctcacttcttccttaagcacggcaggcccctcgcaggaagggtcgattgatttgatgtaaaaaaaagcctcgcagttcgctgcgaggcttttttattgggcaaaagcggcgttagggtttggcgtccgcattgccttctggaatcagcgtcaggtgatgcaggtgaacgaatcccagcgtttctggtgtgatattgctaaagcgtacttcggtggtctgctcgctcgacggaagcagtctcggagtaacggtaataacctgagactgcatatcgacggtcagcggcttgccggtcacctggtcaatctgaccccagtcgacgacggcgctgaaggcaggcagcgctttgcccgaggtagacttaatttttaatacagcgctggtgccggtactgtcttgcgcaatcgagtccagtgaaaggctcagttgggcaaaatcggtgttcagcagggcaggtgttttggcctgcggcagcaaatagacaccgttggtagactggcgattgagcgtagtctgatgctcaagcgcacccgcgagatcggtcagacgatcaagtttctgattcagctgattaacttcggtcgtcagggtcgatacttcaggattttgcgccgcacatccagccaaactgaacagggcggttaaggcgagaatggcacgataagagggagtcattgacctgatgtcctttattcagatttctatactgatacaagagttagtgccaaagtttatcacgatagtgcgccgacgttgcgacagcctttgttgtcgcggcacttcggggtaaactactgtccagataatatccgagcaggaagttctatgcattgtccattttgtgccgccgttgacacgaaagttatagattcacgcctggtgggcgatggatcacaggtccgccgccgtcgccagtgtctggtatgcagcgagcgcttcaccacctttgaggtggcagagctcgtgatgccgcgggttatcaagagtaacgaggtccgtgaaccgtttaatgaagataaacttcgtagcggtttcctcaaggcgctcgagaagcggccggtcagctcggacgacgttgaaatggcgatcagccatatcaaatctcagcttcgcgccaccggcgagcgtgaagtgcctgccaaaatgattggtaatctggtgatggacgcattgaaaggcctcgataaagtggcctatatccgctttgcgtccgtttatcgcagctttgaagacatccgtgagttcggcgaagagatcgcgcgacttcaggattaatcccgctacttacgactccgttcaccacaacagggaaggctatgtttaacgacgatttctatatggcgcgcgcctttgaacttgcgcgcaaagggcgctttaccacaacgccaaaccctaacgtcggctgcgttatcgtgcgcgacggtgaaatcgttggagaaggcttccaccttaaggccggtggcccacacgccgaggtccacgcgctgcgcatggccggtgagcgtgctcgtggcgcgaccgcctatgtcacgctagaaccctgtagccaccatggccgcacgccgccgtgcgccgacgcgctgcttgcggcgggcgtgtctcgcgtggtggccgccatgcaggaccctaacccgaggttgccggtcgcggcctctatcgcctcaaagaggcgggcgtcgaggtaagcaatggtttgatgttgagtcaggccgaaagcgtgaatctcgggttcctcaagcgtatgcgcaccggtttcccttacgtccaattgaaaatggctgcttcgattgacggtagaaccgctatggcctctggcgaaagccaatggatcacctcggcagcggcgcgtcaggacgtgcagcgttttcgcgcggagagttcggccattctgagttcaagtgcgacggtgctggccgacgatccgtcgctgaccgtgcgctggagcgaactgggcgaagagacgcagcgccagtatccgtcagagtttgcctccaccgagggcgtgcgtcagccgctgcgcgtcattgtcgacagccaaaaccgcgtgacgcctcagcataagctggtgcagcaacccggtgaaacgctgctggcgcgcttgcaggccgatgaccacgtctggccggaatccacccagcagttgctggtgcctgcgacgtcgagcaaccgcgtcgatctggtgattctgatgatgcaactggcgaagcgtcaggtgaattcggtgtgggtcgaggccggtgccgagctggctggcgcgctgttgcaggccggactggtcgatgagctgattgtttatatggcgccgaaactgttgggcgacagcgctcgcggactgtgcgtgctgccgggactcgaaaaactggccgatgcgcccaccttcgaatttagcgacgttcgtcaggtaggacccgatctgcgtttacgcatgaaaccggtctattaaggcctgacgcgtgacccatatttgtctctgtctgagcaggtttacaaaaccgtgtgtccaggcaggggaataatatgatagaatccgcccccctgcggctaagcatgggctgggtcgacgctattagtattaagtttttaataaaaacataatgatttaacccatcctaaggaaactctatgaacgttattgaaggtgttgtagcaactcctaacgcgaaaatagccatcgcgattgcccgttttaacaatttcatcaacgacagcctgctttctggcgcgattgatgcgttgaaacgtattggccaagttgcagacgacaacatcaccgttgtatgggttccaggtgcttatgaactgccgcttgcgacacgtgcgctggctaacagcaaaaagtatgacgccgtcatcgcgctgggcactgttatccgtgggggtaccgcccattttgaattcgttgctggcgaatgcagctctggcctgtccagcgttgcgatgaacagtgaaattccggttgcctttggtgtgctgacaacagaaagcattgaacaagccatcgaacgcgcgggaaccaaagccggtaacaaaggtgcagaagctgcccttaccgcgcttgaaatgatcaacgttatcaaggccatcaaggcctgaatctagttaaggggaattccgtgaaacctgctgctcgtcgccgcgcccgtgaatgtgccgttcaggcgctttactcttggcagttgtctaaaaacgacatcgccgatgttgaattacagttcctgaccgagcaggatgtcaaagatgtcgacattacctatttccgtgagctgctgtctggtgttgccaccacggccgacaagctcgacgcgctgatggctccgtatttgtctcgtcagctcgatgaactgggtcaggttgaacgtgcaattctgcgtctggcactgtttgagttgagcaagcgtcaggacgttccttacaaagtggctatcaacgaagctatcgaactggctaaaaccttcggtgcagaagacagccacaagtttgtcaacggtgtgctggacaaagcaggcccgcacattcgtaagaagtaacgttcctcatcaaagaacgcgtttcattaaggccggatatccggccttaatgcattgtaaaacgcaggatcgaaattttttggaataatactatggcatgcggcgaatttgatttaattgcgcgctatttcaaccgttatagaacggctcgtcaggatgtacagttaggcattggcgatgactgcgccctgctgaccgtcactgacaagcagcaaatagcagtcagtaccgacacccttgtcgaaggcattcacttcctcaaaaccatttcacccgccgatttaggctataaagcgctggccgttaacctcagcgatttggccgcgatgggtgccgatccggcctgggtttcactggcgttaacgctgccggaggtcaataccgactggcttgaagccttcagtgacagcctgtttgaacaactcgattattacggcatgcagctgattggcggcgatacgacgcgcggcccgttaagcatgacgctgaccattcagggcctggttccggcaggacgcgcgctgatgcgcagcggcgcacgggtaggcgactggatcttcgtcaccggcaccctcggtgacagtgccgccggactcgccatcctgcaggaccgcctcgcggtcaatgacgacaaggcgagtcaggcattaattaaacgtcatctgcgtccccagccccgcgttttacaaggccaggcgctacgtcagctggcgaactctgctattgatatttccgacggccttatctctgatctacgccatattctcaaggccagcgactgtggtgcacgtatcgacctcgatttgctgccatactcgcaggagatgcagcagtacgtcgaccctgagcaagcggtgaagtgggcgcttaccgggggagaagattacgaactgtgcttcacggtgccggaaatcaaccggggggcgctggaagttgcgctggcacagctgggcgtgcgcttcacctgcgtcggccaaattgcgccgctttccgaaggcattaaatatcagcgctccggtgaaaccgtagagcttgaatggcagggattcgatcatttcgcacaggaggttgcctcatgaccgtcgaaaataacgctcgcggcaacgcaggaagcaagaaacgtccgatgcgccacaagggccgcaccggcaatgacgcagtggatatggcggcagcaaaaaaaaggctgaacctgcgcaacccgtggcacctgttggcgaccggtttcggcagcggtctgttcccggtgggaccgggtaccgcagggtcgattgcggcaatcccgttctggattgtgctgacctatttaccgtggcaggtttactcgctggtggtgatgttcagcatctgtatcggcgtatacctgtgtcgccagacggcaaaagacatgcgggttcacgaccacggcagcatcgtatgggatgagtttgtcggcatgtggataaccctcatggcgttgccgaccaatgattggcagtgggtggtgataggtttcgtggtattccgcgtgctggatatctggaagccgtggccgatccgctggttcgaccgcaacgtgcagggcggtatgggtatcatgattgatgacgtggtggccggggtcatcggcgcggcgattatctatttcatcggacatcactggccaaccggcctgctttaatcggtagcgcaataaaaaacgggcgtctgaggttttccccgacgcccgttttgcttttaacgagtcttgaaattatttaaagcctgtcgcctgatgtggctgataggccatctccagctcggcaatctcttcaatactcaacaccacgtccagtgcggctattgcatcttccaaatgcccggcgcgtgatgctccgataatgggtgcggtgaccaccggtttgctcaggatccacgccagggcgatttgggcacggggaacgccgtggtcttcggcgattttggcaacccgttcggcaattttggcatccgcctcttcggtatcgccgtacagcgttgggatcacctcatcggaaacggaacgcgcggtgctttcaccccatgggcgagtgagtcgtccgcgtgctagcgggctccagggcagcaccgcgatgtttctctcgaggcacagcggatgcatctctttttcttcctcgcgctggataagattgtactggtcctgcatcgaaacgaatgaggcaaagccgtgctgttgctgcagatccagtgcctgcctgaactgcgctgcgtgcatcgatgatgcgccaataaaacgtgccttcccggccttaaccacgtcgttgagcgcctccagcgtctcttcgataggcgtgtcgtaatcccagcggtggatttgcagcaggtcaacgtagtcggtgcccagtcgtttcaggctgtcgtcgatggattgcataatcgacgcacgcgacagtccgcccttgaggttggaaagcgggaagaacaccttggtcgccagcacgtactggtcacgcttcaagtattcacccaggactctaccgacgatttcttcgctgctgccgtcggaataactgttggcggtgtcgaagaaattgatgccggcgtctatcgcctgtttgatgagagggcggctgctctcttccggcagtgtccaggcgtgtttcccgcgtgaaggttcaccgtaggtcatacagccgaggcacaggcgcgacacgttcagcccggtggttccaaattgtgtaaattgcatgatttctcccgcatcagcttaaaaacttacgcataaagttaagccttaactgtagctcagtctgagagggcgcgaggaaaggggcaccgcgggggaaggtaaatcccctttttgctaaagaaaaagggggaggatgacggcctattagcggggagttatcaggcgagccagtcgtttatctggcgcacaatgcctgcggcatcgagaccgaggtcgctgcggatctcttcctgcgtaccctgcggcacaaacaggtcaggcagaccgatgttcagcaccgggacacagacacgtttagacattagcagttcgttaacgccgctgcccgcaccgcccatgatagcgttctcttctacggtcaccagtgaatcgtggctggcagccagagaaaggatgagttcgttatccagtggtttgacgaagcgcatatcgaccagcgtagcgttaagctgctctgcggcttctcgcgcctccggcaaaagggtaccgaagttgagaatggcaatcttctcaccctcacggcgaactacgcccttaccgataggcagcgaggccagcggctcacaggttgcaccggtgccggtaccgcgcggataacgcaccgcgaccggaccctgctggtggtggtaaccagtgtgcagcatctgacggcactcgttctcatcgcttggcgtcatgattatcatattcgggatgcagcgtaggaacgacaggtcgaatgcgccctgatgggtttgtccgtctgcgccgacaatgccgccgcggtcgatggcgaacagcaccggcagattctggatagcgacgtcgtggatcacctgatcgtagccacgttgcaagaaggtcgaataaatcgccaccaccggtttgtagccgccgatggccagacctgctgcgaaagtcaccgcgtgttgctcggcgatcgccacgtcaaaatattgctgcggataggtcttggagaatttgaccatgcctgagccttcgcgcatcgcaggcgtgacggccatcagcttgctgtctccggcggccgtttcacacagccagtcgccgaagactttcgaatagctcggcaggccttctttgctcttaggcagcgttccgctggccgggtcgaatttcggtaccgcatggaagctgatggggtcattctcggctggcgcatagcctttgcccttgcgggtcatgacgtgcagcagctgagggccttgcaggtcgcgcatgtttttcagcgtctgggtcaacgccaccacgtcgtggccgtcaaccggtccgatgtagttaaagcccagctcttcaaacagcgtacccggcacgaccatgcctttcaggtgctcctcggtacgacggatgagctccttaataggtggaacacccgacagcaccttttttccgccttcgcgcaggcgcgaatagagcttgcccgacagcagctgcgccaggtggttgttcagtgcgccaacgttttcggaaatcgacatttcgttatcgttaagcacaaccagcatgtcagatttgatatctccggcgtggttcatcgcttcgaaggccataccggcggtgatggcaccgtcaccaataacacagatcgttcgacggcctttaccttcgcgttcggcggcaacggccatgccgagccccgcgctaatggaggttgaggagtggccgaccgacagtacgtcgtactcactctcgctgcgccacgggaacgggtgcagaccctctttctggcggatggtcgaaatcttgtcgcgacggccggtcagaattttatggggataggcctgatggcctacgtcccaaaccagatggtcgaaaggggtgttgtagacgtagtgcatggcgacagtcagctctacgacgccgagaccggacgcaaagtggccgctcgacttgctcacgctgtccagcaggtactggcgcagctcgtcacagagcttcggtaagctttctttcggaagcgagcggagttcttcggggttctccgccagtgccagcatggggtatttggctatatcaagactcattggttactcatataagaggctcatccaagcagtatggaaatatcgcgacgacagcggtttacgggcaatcagctgtcacgctcaataacaaagcgggctaatgccagcaatggggccgtgttgtaagaatgtgtggccagctcgtccagggcggcaacggcttcctgataaaggtctttggctttggtctgtgcgccttccagcccaagcagggcgggataagtacttttaccaagctgttgatctgcaccctgacgcttgcccagcgtgtgggtatcaccaatgacatccagaatatcgtcctgaacctggaaggcgagaccgatggcctcggcgtaacggtcaagcagcggtagcgcagctcgaccgcgagcaccggctgccagagcgccgatgcgaacggcggcgcgaatgagcgcgccggttttatggcgatggatacgctccagcgcctgtaaatcaacctgcttgccttcggcctcgaggtctaaggcctgacccgcacacatgcccgctacgccgctggcgcgcgccagttcggagatcatcgacaagcgatcgctcaccgcgacctcgggcatctctacgtcggccagaatcgaaaacgccagcgtttgcagggcatcaccggccaaaatggcattggcttcaccgaatttcacgtggcaggtcggctggccgcgacgcaggtcgtcgtcgtccatcgcaggcaggtcatcgtgaatgagtgaataagcgtgaatgcattcgatggcagcggcaggcgcgtccaggctggttaattgcaggccaaaaagttgtccgctggcatacactaaataaggacgcaggcgttttccacccagcaatgagccatggtgcatcgcggcaaccagcggcgtgtcggaaaatggcagttcggcgacatagccttcaagaacgccatcgacacgcttttgcagctcacggagctgatgactgaagcttttcgcttcgctttgttgttctatttgggacatcaggaattactcagcttccggtgtaaaaggttgcaaaggggcatcgttatcgctgtcgagcaggatctgcacgcgctgctctgcctgctgtaacttttgttgtccctgacgggcaagctgtacgccctgttcaaactcattcagcgcgtcctccagcggaagttctcctgattcaaggcgagcgacgatttgttcaagttcagccaatgcagtttcgaaattggcaggtggtgcagctttttttggcataattctctttcaatatcgaaggtctgggagccgtaggatatccctatgataacgtcggcgcaggtaaccagctattatgatgcatccttttgcgcgcaaagtacccgattaaagtgctatactccgcgccgcagaatatattggtaagcgcagtattcgtgaatcatacgtttaccaatagttgattctagatccttattctcacacttacgacccagtattctcacccgctaacaaaagaatgccatgaagtttatcattaaattgttcccagaaatcaccatcaagagccaatctgtgcgtttgcgcttcattaagatacttgcaagcagcattcgtaacgttgtgaagagcagcgatgagaccctggccgtcgtgcgccactgggatcatatcgaagttcgcagcaaagacgaaagcaaacatgaccagattgttgaattgctctgccgcattcccggtattcatcacgtactggaggtcgaagaccgcccgtttaatgatgttcaccatattttcgagcagacgctggaagcctaccgcgaagagctcgaaggtaaaaccttctgcgtgcgcgttaaacgtcgtggcaagcacagtttcagctctggcgacgtagagcgctacgtcggcggcggcctgaatcagcatatcgcgtcggccaaggttgatctgaccagcccgcaagtcaccgttaagctcgaaatcaacgatgaccagctggtgcttatcaagcgccgctatcagggcctgagcggataccctatcggcacgcaggaagacgtcatgtcactgatttccggtggctttgactccggcgtctctagctacatgctgatgcgtcgcggcagccgcgtgcattactgcttctttaatctgggcggttccgcgcatgaaatcggtgtgaaacaggttgcttattatctgtggaaccgcttcggcagctcgcaccgcgtacgctttatctctatcgatttcgaaccggtggttggcgaaatcctcgaaaagatcgaagacggtcagatgggcgtcgtgctcaagcgtatgatggttcgcgccgcctctgccattgccgagcgctacggtgtgcaggccttggtgacaggggaagcacttggccaggtatcaagccaaacgttgtccaacctgcgactgatcgacaacgcgaccgatacccttatcctgcgcccgctaatttctcatgacaagcagcacatcatcgatatcgcccgcgaaatcggcaccgaggactttgcgaaaaccatgcctgaatactgcggcgtgatttccaaaagcccgaccgtaaaagcgattaaagcaaaaatcgaagccgaagaagcgctatttgatttctcgattctggaaaaagtcatttccgaagccaagaatcaggatattcgcaccattgccgaagagtcgcagcaggaagtggccgaagtcgaaaccgtggctgattttgccgcgaccgacgtcgtgctggatatccgagcaccggacgaacaggaagagaatccgctgcagcttgaaggggttgaaacagcggtgcttccgttctacaaactcggcggcgcttttggctcgctcgaccagagtaagacctacctgctttactgcgatcgtggggtgatgagccgcctacaggcgctttatctgcacgagcagggctataaaaatgtgaaggtttatcgtccataggccatcagcgctgagtgcgataacgaggtagaaaaagggattgccgtggcaatcccttttttatgcgcagattttagcaatccggtcccgggcagggttactttgcgttttgccgcagtttggcgatttcttctttagctttcgccagctggctgacgaactgtgggttgttgtgcagtcgggcgacgaccgccgacgacacgacgcgcgccgcatcgacgtcactctgccagtgatagccgcaaatcacgcggctttggcccagttcgaagccacgtttgaggatctcgttttggcgcgttggattaatttctgccagcaccaacgcaatcgaccagccgatggcggtatggcctgacgggtaggatccgttcttggcgagcttgctttcatcatccgggcggcaggtaggttcgtggaagaaggcgaaaggacgaatacggttatatttttccttggcggatttggtggcatagtctccggcgtcttccttcatggtggcgatgagctcatagattgccggggtattctgcgcggttatctcgaagccgaacggggtggagaagtttttggtgacgttatcggccgacgagtcggcgtcgctgtaggcttgtgtgccgcgtggggtgttacgcaggtatttgccctgctcgtaggcagctttatcggcctggaaggccacgctgtcaaaggccggaggcggcgggagtagctgcacgctgtcggcggtgtcttgcagcgtcagataatgcttgtcagcggcctgcacgtagccggtcagtaccagactgattaacagggcagaggtcagttttttcacgtttatttccctatcgtgtttaaaagatgctttaaatttcgaaacatttggaaataaaatgatatcaaccgccagacttactgcaacggagaagactattgattgtgatggcgctcccgttaaccggtttatgtttctactctatggcagtatcaggccaaatttgctgcttaatcagatccacgtagcaccacataagagcgttagaaacttcggtaaattcctgtattagcgcttcattttggcccagcatgtaggcttctctactcacgctatcaatatttttgaccagttttgtgccccagctagatgtcgcaagcaaattgtttttgcaggcaacaatttcgatgtttttcagcacctccttcgcgcgagtgcattttttctgaaggttttgtgtgttgctgtgtatggccgccatgctgagatacagtccgtcgattctggcggtcatcaggatgcacgtctgagctatctcggaattaaaatagcctggaggattggggcagtccggcaaagaggaggggagaatagggggataatcatcacgataacctcttgaaaagagataattataatccctttatattgagtcgcttttatctttcgctcaatcctcaaaatcagttaatccgcagcgccagagcatggcgctgcggatcaagattcagtcttgatagttgtgtacacccgggtaaagcaccaactgcgaggcgacctcggcggctttagctttgcccatcagcaggtcaatcattttaagcgcgaattcgatcgacgtgcccggcccctggctggtcagcagattgacgcgcgggtcgaacattacgcgtttatccatccacttatcaggtgacaccttgtccttcaggccggggaaaccggtcatattgccgaccgggaaaaggtcatgatattccagcaccagcgcgggtgcggcgcagatagcggcaaccagttttccggtgacgttaacgtggcgtaccttttcgaccagcagcggactgtcgcgaaaacattctgcacctttcaggccaccgggcagcacgatggcgtcaaattcttcgtctgcgacgtcaaccagtgcgacgtcggcgaggattttcacgccgcgcgaacagcggatctcaaggttgccatcacccgccacgctggcggtggtgacgttaaccccggcgcgaaccagcaggtctatcgcggtgacggcttccagttcttcactgccaggtgccagacataccagagccgaaacgctcataatcactttcctttcttttaatcatttcgaataatttattgttcatcggcagctgcaaaccgtggctgcgaccacgacgcaaaacgtaaccggtgatgtagtcaacctcggtgtgacgttgggtgcgaatgtcctgcaacatcgaggaatggttggccgaggtagtatcgataacctgataaacatagctcagcagcgactctttgtgggtctgatagccttcaattgccatgacttctgccacttcaccgcagatgctttcaatcatctcaccgtgcgctatgaggtcgccgttggtacagttatacaccgcagtcaaaggattgatcacgcagtttaccgccagtttattccacagtgacggcagaatattgtcgtgccacgcgacgtcaggcagggcgctgtgcagaggatcggccaggtagcttgcccccgcaccgcgctgatttgccggaccgatatgcgtgatgcccgccgcgacgtgaataatcgcatttccttcgtgtcgcgccgcgtgggtcgtcgctcccagtagaatcggctggcgatgtgctgggagttcatcgacggttcccataccgttgtgcagcagcagtacgctgcagttttcgttgagctttggcagcagcgtaccgagcgcgctggatacctgccaggctttcagcgtcacgataagcaactcgctgtcggctaaatgctggggatcgttggtcggcaaattacgattgaacgcggtgccgtcgggagagatgacgttgacggcgcagaacggttgtggaatgcgtacccatccttgcacgtcgtgcccctgctggtacagcgtcgagagccagagttggcccagcgcgccacaccccaaaacactaatcttcatctttgctcctatttacccccgcagctttcgcgccgccgccttgccgccacacaaaatctaccggagtacagacagtgtcccaaaatcaaaagagacgttggaatgttgccaaaacgttaaatctatacctcaagtatagtcttttgtgggccaggtcacacttttgatgcaaacattaattctgctcggagatgaggatggcatgggtgttgggttctaacgctttgaaaacgtgaggttgatcgcctgggtaacagatatagtcgccgggattcagttcggtagctgaatcggttgggccaaccagcgcccggccctgagtcacgatcagatgttcaatcgagccgggagaatgcggatgcgaatggcggtcttcacccggctgggtgatcagttgatagatatctcttctcgcacccggtgggcaggtggctaagagtatcgccttgtaatgcgccatctctgcggtcaccgacggtccttcgccaaaacgaatcacttgcgaagtgctgacttcctgttccatcaagcgggcgaagggaatatccaacgccacgcacagggaccacagggtctcgatgctgggattgccgttccctgactccagctgtgacagcgtggattttgctatcccggcgcggcgagagatctcggccagcgacaggccggtgcgctggcgttcgcgcacgagtgctttggcaataatgctgataggttgcgtcatagtggctaccggtgttttttatatcgaacgatcgttcgtcttgtaagttcgctgtgaattgttcattataacagccttcgcgttcgatatgggataggtatgatgcgtgttagttggatttcaccgctgggcggtgatgttatcaaggccattgcactggtgtgtctggccgacggaattgttggcatttcttatggctcgatggcgacggccgttggtttcccgctgtgggtgccaatgacgctgtcgctgttggtgctggccggtgcctcggagtttctgtttatcagtatcgtcgcgggcggcggtagcccgtttgcggcagcggcggccgggctcttagtcaatgcgcgtcatctgccgtttggcatggcggtaaaagatttgattggcagtgaggacgcagcgcgtcaagggctggcctatcgactgctggggtgccacatcatgaacgatgaaagcgtggtgtttggcgtgtcgcagaaaagtccggcgaaaagccgtgccgcctattggctctgcgggttggggatcgtagtttgctggccgcttggggtattgattggtggaaccctcggcacaatgattcctgatatcaaggtgattggcctcgatgcggtgttccccgccattctggttgccttgacggcatcggcacttaaacatcggcaaacgctgcgccgtgctctgaccggcatggcgttgtctctggctgcggtgccgctggtgcccgcgggcctgccggtgctgttttcactgtttggcctggcgctgtggaggcgacacaaatgaccgaacatggcctgattatcgccggaattacggtgttggcgaccggaacctatctgctacgactggcgggatttcgtctcggcagtcgcctgacgctctcccctggggcgaacgcattgcttggcgacgcggcgacgacgttattattggcggtagccgcggtagcaaccctttatgagggggcggattcgcggggtatgcccgtcctgtcggcgtggcggtcgccgcatttcttgcctggcgtaaaaagccgttgattgtggtgattctggttgccgcagccgtgagcgctggactgcgccaaattggcttaaaatagtcctaaaaactgctaacgacgtcagtttgtgtcgcctgcttttggcaatgttcagggaagacggtatcatgtctgccatcgcagagtacgtacaaataaatttaagggagaagcgacaatgccatctttcgatattgtttctgaaattgatatgcaggaagttcgcaacgcggtcgaaaacgcgacccgcgacctggctaaccgttgggattttcgtaatgtcgaagccagcttcgagttaaacgagaaagacgagagcatcaaggttgccagcgtttctgattttcaggttgagcagctgctggacatcctgcgcgctgccttgctgaagcgcagcattgaaggcggtgcgttggagattccgaaagagatgacccacagcggcaaaacctacagcgttgatgccaagctgcattccggcatcgaaagtgcgctggcgaagaagattgtaaagctgattaaagacagcaagctgaaggttcaggcgcagattcagggtgacgaagttcgcgtaaccggtaaggcgcgcgatgatttgcaggccgtgatggcgctggtgcgcggtggggatttgggacagccgttccagttcaagaacttccgcgactaaaacgggctttccccgcctttattctgcgggggaaagtagaagggggagacgctgtttcagcgcggctccccctttatctctcatcaggcctggctaacgaacgcctctaatgcctgtcgatttgtctgcttggtatccaccttcacgtaggcgctcagctcttccgctaccacgaccacgtcggctacgcccggctgcgatttcatgcgcgttgccagcgttgcgtctttcgccacatcttcagacagcgtaatacgcaggctgctgacgtaaggcggttcagacatcgtggcactcacaaagaaccagactacggcaatcgccgcacaggccatgaatacggcaccggcaccggcatgaccgaagataaagccgccgaggctaccgccgattgccacgccgataaactggctcgtcgagtaaagacccatcgcggtacctttatagcccgcaggggattccttactgataagcgacggcagaatggcttccatcacgttgaaggccaggaagaacagctgaatcccggtaatgatcgcccacagatgaagaccggcagcccacagcaccagctctgccagcagcagcaccgcgacgcagcccatgaacacctgcttcatgtggcgctttttctcggcgtaaatgataaccgggatcacggcaacgaatgaggtcagcatggtgaccagatagacgcgccagtgttcactcggtgggaatccagccttttccatcacctgcggtaggaccacgaagctcgacatcaacaggatgtgcaggcaaaggatgccaaagttgagtttcagcagtttcccgttggtcagcaccttgccaaagctgcctttcaccacgctcgattcacgattgagcaggtgagtcgcaggggaggggaccacggtcagagtaatgacgatgccacaaagggtcagaaccgcaatcgcccaaaacagtgcgtgcaggcccaggcatgggtaatgattgggccgagtaccatcgcaatggcgaaagtaatcccgaagctgatgccgatgaacgccattgctttggtccggttctgctcgcgggtcaggtcggacatcagcgccatcacggcagcggcaatcgccccggagccctggagtgcgcgtccgataatgacgccccagatagagtgggtgctggctgctatcacgctaccggcggtgaagataagcagcccgaatacgataagcggtttgcgcccgatgcggtcagaaagcaggccgaacgggatctggaagatggcctgggccagtccgtagataccgatggcaataccgatgagtgtttcgcttgcgccggctaatgacatgccgtaagtggttagaaccgggagaaccataaacatgccgagcatgcgaagtgaaaatactgtccctagtccccaggtcgcccgactttcctgacgggtcatttggttatcgttcattgctacctcaaaattacaaacaacgacattgtagtgtcttttttgtgtgcaggtaaattgctggatgtttagcagatatttcaggtttctcaaggagggctgaaaaattaattatacaacgaaacgcacaggtaaagaggggactaaaaaagcttaaaaaaaatggccggtcaagaccggccatttctcatttgacgttaaccgccgagcttaccaaacgtaggtcagtaagctgctcggtgctgccgcgttaaagtcgatagacatcatgacactcagtgacgtgatggcaacgatggagaaaacaaacagctttcttgcccatacgatgtcattttcagttttgtatccgcgcagtgccatgcccagccaccaaacgcttaccgctgctgcaacaatcaggtatttataacctgcgtagccactcagggtcagcatcagtgtggcaatcataaaggccaggatccagaccgtaatatgatgcttggcaaccgcaacgcctttaacaaccggaagaaccgggatattcgctgcctgataatctttgaagcggaagatggcaatcgcataggaatgcggcatctgccacaggctaaagatcagtaacaggatcaacgcaccggtatcgaactggccgctgacggcacagtatccgataaccggcggcgcagcgccggataagctaccaatcagcgtgccgtagacggatttgcgtttcatgtacaggctataaatcccaacataaaccacaaagcccatcactgctaaccacatagacagcgggttagcaccaacatacagcaacgcaaagcctaaaatacccaggagagtagcgtaaaccagggtggttttcggcggtataagtccttttaccagaactcggttcttcgttctttccattaccttgtcaatgtcgcggtctatgtagttgttaaacacacagcccgatgcgacgaccaacgagacgccaacaaacgcagcgagaaagagagggaagtcgatgcttcctttggaagcaaggaggaatcccccgacgacagaaattaaattaccgaaaataattcctggcttagttacttgcaggtatttcttaatcatcacatgcagctcggcttttaactgaccatcatattgaggttgaggttatacataatccacagtgagcccacaacgacgataaagataatcacagcggtgaacaggaacgcaatcaggttccaacgtccttcagatgatgtattcatgtgcaggaaatacaccaggtgaacaacgatctggattactgccgacgcaacgactgtccccaggatgagtgagtgagaggcagtaccgctcatcaccatcgcaaatgggataaccgtcaaaattaccgacagcacaaagccaatcatgtacgacttgacgctaccgtggcttgcaccgccgtgagaggttgctgaatgactcatgacaggactcccaacagatagacaacggtgaatacacaaatccagactacgtcaaggaagtgccagaacaggctcagacacatcaggcgcgtttggttcacggcggtcagaccgcggcggctaacttgaacaatcatggtgattatccaaatcagaccgacggttacgtgcagaccgtgcgtggcaaccagggtaaagaatgcagacaggaaaccactgcgctgcgggccgtaaccttcgacaatcaggtggtggaactcggtgagctccatcccgataaagccgagaccaaacaggaaggtgatgaacagccagcctttaacggcgcctgctttacctttgctcatgttcagcattgcgaagccgtaagtaatagaacttaacagcaggcagaaggtttcaaccaacacaaacttcaggtcgaaaatgtctttaccagagggaccgccagcggtcccgttcatcagtactgcgtaggttgcaaacaggcttgcaaacaacacgcagtcgctcatcaggtagatccagaagccgaagactttggtctcacccgcatcgtggtgcccatgatcgtcatgggccgcatggttagtcagagaatcagttgacatgtttcacgcccgctttgctgatattttcataatgttggttttcgatacgttcaacttcttcaactggaacgtagtaatcaacatcctcgtcgaagcttttccagatccaggtgatgacgatgccaagcaggccaacgacgactaaccaccacatgtcccagattgctgcgaaaccgaaggccaggctgaacacggagataacaaagcccgcgccgctgtttttaggcatatgaattttttcatatttagccggtttcttgtaagcagtgcctttctctttcatgtcccagaactcatcacggtcgtgtacgtgtggcacgatagcgaagttgtagaacggaggaggagaagaggttgcccactccagggtacgtgcaccccacgggtcaccggtcaggtcacggttctgctcacggtcacggatagaaacgtagaacatgatgaagatacacgcgataccacaggcgatcagtgctgcaccgccagcggccacaaccagcaaggtgtggaactgcgggtcaatgttttggctcagacgacgggtcatccccataaagcccagtgcatacagcggcataaaggcaacgaagaaaccgataatccagaaccagaacgcacgcacgccccatttctcgttcagcgtgaagccgaaggatttagggaaccagtaagtcagacctgcgaagcaaccaaataccacaccgccgataataacgttatggaagtgagcaatcaggaacagactgttgtgcaatacgaagtcagcgccaggtactgccagcagaacgccggtcataccacccacagagaaggtgatgatgaagccgatggtccacagcattgctgcgttcagggtaatacgaccctggtacatggtgaacagccagttgaagatttttacccctgttgggatagaaatgatcatcgtcatgataccgaagaaggcattgacgttagcgcctgaacccatggtgaagaagtggtgcagccaaacaatgaacgccagcaaagtaatggcaatggttgcccatactaatgaggtgtaaccaaacaggcgtttcttggagaaggtcgcagtaacttcagagaacacaccgaacacaggcagaatcagaatgtacacttccggatggcccaggcccaaatcaggttgatgtacatcatcatgttgccgcccatatcattggtgaagaaatgggtgcccacgtagcggtcaagagtcagcagtgcaatagtcacagtcaggatcgggaacgaaatgatgatcaggacgttagtacacagcgcggcccaggtgaacactggcatcttcatcagaggcatgcctggcgcgcgcatcttcagaatagtggtgaagaagttaacgccggtcaacaaggtcccgataccggatatctgtagactccatatccagtagtcgaccccacgcccgggctgtattccttacctgacaacggcgggtaggccagccagccagtctgtgcgaactcaccaatacccagagagatgttgatcagtaccacagcaacggcggtgaaccagaagctgatgttgttcaggaacgggaaagcaacgtcgcgcgcaccgatttgtagcggtacaactacgttcattagaccgataacgaaaggcatcgccatgaagaagatcatgattacgccgtgcgcggtaaagatctggtcgtagtggtgcggcggcaggaagccgggactaccctcagatgccagcacctgctggctacgcatcatgatggcatcggcaaagccacggataagcatgacaatcgcaaggatgatgtacatgatacccagttttttatggtcaacagaggtaatccactctgaccacagatatttccatttaccgaaataggtaattgccgctaacagggcgagaccgcccacgatgatagcgccaacggtgaccataacgattggtacgtcaaatggaatgtcacttagcgttagttttccgaacatcttattattccccggctccggcagtgtgagacttatcacccatatccatgcccttcatgtctgtgcctgctggcataggcattgtctggcctgttgacatgttcatgtcatgtgaatattgatgaatgatctctttaaacaagtctggctgaacggtagagaagtattcgactgggttgtcgatactgtccgcggccaatttcttgaaatcatctggtgttgcgagctgattcggagcttgcttaactttcgcaacccacgcatcaaaatcggcacgggtaggtgttgcaatagcgttgaacttcataccagagaagccgcgaccactgtagtttgccgagatgcctttataggtaccagcctcgtttgcaatcaagtgcaactgagtctgcataccggccatcgcgtaaatctgtccacctaactgcgggataaagaaggagttcataacagagttagacgttactttgaactgaacaggcacatctttaggaataaccagttcattaaccgttgcgataccctgctctggataaataaacaaccatttccagtcgagtgagacgacttctacggtcatttgtttttcattgctaacgataggtttgaaaggatcaagctggtgtgtggttttccaggttatcgttgccaggatggcaataatgataattggaatggtccataccacggcttccactttgttggagtgtgaccaatttggactgtacttagcgtttgtattagaagcgcgatacttccatgcaaaagcaaaagccatcacgatcactggtataacgacgatcagcattaagccgatggctgtcagtatcagcgtccgctgctccagtccaattgctcccttgggatccataattgccgtattgcaaccacttaacattacagtggatgcaaatatagacaacatcccaatacttttattgtatttcttaagtctcatctaacgacctcaataacagggctctattgtcgcttcatgtgtacgggcattttacgggaaggttacggtactgtaaacacgcttaaagctgtgtaaatgcccgtcccacactttatgttaacgtggtcacacatgttacgtgaagtgacaatttctgaatggcaacaatgccttgcgctattttcattcgctatgacgagaaaaaacaaggcgtagcaagggaatggatatttagtgccttttttaaatgtttatgctaggtataaattatgtaaacagaatgttgaaattgagtgaaattaaatttaataaaaagattaaaaaaaggtcagaatgaaacaaggtgtaaatggttaatatttttttatttatgttaagaggtttattgatccagatcagggtaaatcaggatattaaccaaataacaacaagaattccccaggatacacaacatttatgtcgcctggagaaggggggattgatggcgttttggacgcgaatgacaaaaacagtgtagaggagattatggatcgtgccaggcaaacgctaaattttttcctggcggcgcagggcgaggaagtccagcacgctgccgagtacgatgccaagcaggcaaagcagggcgcccagctggacggttttaccggcaagcgtcgccagatgcgtccagtctaatccgtcggtaatcagcatgaccacccacagcgctaacaataaactgcccgtcagcaacaaacgtaacgcccaacgatatgagcctgcgaaatgcactcgcggcaagaagctgtccgtgcgctgggtatattccagcgtctgacgacacatagccagcaacagcaagccaggaacggcggcaacaattgagaagagataaaacgccgaccagccgttcgcctcgacaaaccatccggcaatcgggcctacgtagaccctacccaccgccgaaagcgccgacagcaacgcgaactgcgtcgccgaaaacgatttgttgcacagtgccatcaatagtgcgacgaaggctgccgtgcccatgccaccgcacaggttttcgaaaaagatggcggtgcccatcgaatagagatgtttgtcggtgacggcgagtatccagtaaccggcgttcgacgcgccctgtaaaatcccgaacagcattaatgcgcgaaacaggctgagacgctgcatcagtacgccgccaagcagtgcaccgaagatagtcgccagtaatcccagcgtcttgttgaccagcccgacttctccggcgtcaaagccgacgccgcgaatcaggaacgtggtgctcaggctaccggcgaaggcgtcgcccagcttgtacatcacgataagcagcaggatgagccaggcgttattgcgcccgaaaaagtctttcagcggggcgacgaccgccatctcgagcgtcgcgggtacgggctgatgaatatcaggctcaggggcaaacagcgttgccgcgacgccaatcagcatcagcacggccatcagccagtaggtatgttgccaacccagataacggtcggccagccacagcgccagcccgcccgacaccagcatggccaaccgatagccgagcaccgacaccgccgcaccgttgccgcgctcttccgcgctcagcaggtcagttttataggcgtcgaacacaatatcctgcgacgccgacgcgaaggcaatcagcaccgccagcgctgccagccagaacaggctgcttttaggatccatgtaacccatggcaaaaatagccagcaccagtaacagctgagtgatgatgagccagccgcggcgtcggccaaagaacgacggcgtgtagcggtccatcatcggcgaccagaggaatttgaacacataggcctgaccgaccagggagaaaatgccgatagtcttgaggtcgaggttttcgaccgtcatccacgcctgaagggtgcccgaggtcagcgcgagcggtaagccggatgcaaagcctaaaaggagcaaaatcgcggtattacgttgggtaaagatagtgaagtactgttttagcatggcatccgtgttcctgcaggccgttaaagaggggggctgagggcatcataaaggataaacgcggagaataaaggagggattgggcagaggaatcaaaaggttctgcccggcatggccgggcagagggcaggattagtgcgagttggctttgataaagtcgctcacgctggtgtcctgtgccatgtcggagatgacgtcacccaacgcagtgttaacgacgttggtgattttagcgtcggtcgcagtgaatgcgccctgcacgttataagtcgtgttgtagttcttgacctgtttgttgccattcttcgcggtagcgatgatggaaatgtcggccttggtggtgatgttgtagcgtaggttgccttcctgaacgtcggcatacaggcggttaaccacgatttgcaggtctaccgcgccatcaggaccaatcatgtagccgcgtgcggtcatctgtttttccagcgcttcttgcagcaggaaacgcagatcgcgtgacggtgtcagggagaccagctggccgtcgcggttcactttcgcgagtgccttgtcttgacgcatgtcggcgccgttaatgctgatagtcacacccatcagggttggatcctgcgttggcagggcaattttcggggaaatgttcagtgtgttgctgctggtagcacaacctgcaagcataaagactgccagtacagggaaaagaattttcttcaacatggtcattttctcaattttccatcttttcaagataaaaagttagcgtgttttgattgtagaatgggcagcatcatagcattgccaccgtttagcgtgccatgggattggacctcggaaataggtaatttatcgccggtgagcaaaaaatagtcataagaagttctaatctgcatctcaaacgactattttgttcacataagtaatattttcttggtgaaagtaagaataatacagaaaacagcctattatttagtatcagacggcgaaatagttgggcgcagttctctgtaagacgtgttttaaggagatggctatgattcgcgagcaaatagaagcaaagttagctgcagcgtttgaaccaacgcacttggacgtaaccgatgagagttatcgccacaatgttccggcaggatccgaaagccactttaaggtggtgatggtgagcgataagttcgttggcgaacgctttttgtcgcgccatcgttcaatttattcagttctaacggaagaactggcgggcagcgttcacgcgctggcgctacacacctacacgctgaaagagtgggaaggcctgcaggatacggtgccagcttctccgccgtgccgaggtgcaggcacacttgcctgaaatagcttattttcagcaaaatcgtcactaaaaccctattaatcgacagtatctctggaactttgcccccgagatgcggtattagtagaggcgaattttgaaacggcctgcgggccgttttttattttggggtttgttgttgaggtttttggttttaagacacgcgtcctcgactcgcagcggttgcgccgctataatgtcgcgtcttatttttccggaatggtttcgggacttcctcgaatactgaatcagggttctgcatgaagcgagccggttcggggttgaccgagcactgtgatttttttgaggtaacaagatgcaagtttctgttgaaaccactcaaggccttggtcgccgtatcgctattactgttcctgctgaaagcattgagaaagcagtaaaaagcgagctggctaaagcgtctaaaactgtacgtattgacggcttccgcaagggcaaagtaccacaccacatcatcgaacaacgttatggcgcaagcgttcgccaggacgttctgagcgatctgatgcagcgcagcttcgttgatgcaatcatcaaagaaaaaatcaacccggctggcgcaccgaactatgttccgggcgaatacaaactgggcgaagatttcaacttcaccgttgaattcgaagtttatccagaagttgaactgaaagatctggaaagcatcgaagtagaaaaaccagttgttgaagttaacgaatctgacgttgacaccatgctggaaactctgcgcaagcagcaggctgattggaaagaaaccgacgcagccgttcaggctgaagatcgcgttaccgttgatttctctggttccatcgacggtgaagaattcgaaggcggcaaagcctctgacttcgtactggcaatgggccagggccgcatgatcccaggcttcgaagaaggtctggtaggtcataaagccggtgaagaattcaccatcgacgtaaacttcccagaagattaccacgctgaaaacctgaaaggtaaagcggccaagttcgctatcgttctgaagaaagttgaagagcgtgagctgccagaactgactgaagaattcatcaagcgtttcggcgtggctgatggttctgtagaaggtctgcgtgctgaagtgcgtaaaaacatggaccgtgagctgaaaggcgcagtgcgtaaccgcatcaagtctcaggcaatcgaaggtctggttaaagctaacgaaatcgacgtgcctgctgccctgatcgacagcgaaatcgacgttctgcgtcgccaggctgcacagcgtttcggtggcaacgagaaacaggctctggaactgccacgtgagctgttcgaagagcaagctaagcaacgcgttgttgttggcctgctgttgggtgaagttatcagccagcacgaactgaaagctgacgaagatcgcgttaaagcgctgatcgaagagatggcttctgcgtacgaagatccgtcagaagttatcgagttctacagcaaaaacaaagagctgatgaacaacatgcgtaacgtcgcgctggaagaacaagccgtcgagaccctgctgtctaaagctaaagtgactgagaaagccacgacctttaccgaactgatgaaccagactaccccagcttaagttttcgctgcggttaactgttttatcctggtatcaagcccgtagtttgcactacgggcttttttattgcatgttcaaagctgaaaggtaatttttagctctttcgtgcactacattttcttcgctttgcactatatttatcagcgtgataaccgaaaaatcgccagccagtacaataattgagctgtttgatcactcaatgattcgcgaggagaaaagaatttcaccagaggcttgaaatcttgtccttgcccccaattgtcttgtgctacaagggtaactttgctgttagcttctgactgataacaaccgtcagccgtgtatgtggcgacttggccgcttgagcatagtcatcatcgcttatctcaagtagaatcggtttcaactcgcgctaaagagaattctattaggagacggttatgtcatacagtggtgaaagagaacaatttgcgccaaacatggccttagtaccgatggttgtagagcagacttcacgtggtgagcgctcttatgatattttttcccgtctgctgaaggaacgtatcatcttcctgaccggacaggttgaagaccaaatggctaacctgattgtggcccagatgctgtttctggaagccgaaaacccggagaaagatatttacctttatatcaactcaccgggcggcgttatcaccgcagggatgtctatttatgacaccatgcaattcatcaagcccgatgtcagcaccatctgtctaggccaggcgtgctctatgggctcgttcctgctgaccgcaggtgccaagggcaagcgtttcgcgctgccaaactcgcgcgtgatgattcaccagccattgggcggtttccagggccaggcgacggacatcgacatccacgccagagagatcctgaaggttaaaaaccgtatgaatacgctgatggcgcaacatacgggcaaatctcttgaagaaatagagcgtgacactgagcgagatcgtttcctgtcagccgacgaagctgtagagtatggcttagtcgataaggtaatgactcatcgcggcgaactctaatcggcaattttctgctgacgcgatggtctatagttaaactcatacggatgttttttgagtgcggcggcgtgaaaatcgccgccctatgctttacctgaagcatgagatatgagtgaattgtttcaatagacacagccaagcgtcagtcagtgacatgtctgttgagttaaatggtcgtaccgccgtgtgttgtccgcgggactgagattaaagaagaggtttactgatgacagataagcgcaaagacggttcaggaaagctgctgtactgctctttttgcggcaaaagccagcatgaagtgcgtaagctgattgccgggccgtcagtgtatatctgcgatgaatgtgtcgacttgtgtaacgacattattcgcgaagagattaaagaagtcgcaccgcatcgcgaacgcagcgcgctgccgacaccacacgaaatccgtgaacacctcgatgactatgttatcggtcaagagcctgcgaaaaaagttctggctgttgcggtttataaccactacaagcgcttgcgtaacggtgataccagcaacggtatcgagttgggcaagagcaacattttgctgatcggcccaaccggtagcggtaaaacgctgctggcagaaacgctggcgcgtttcctggatgtgccattcactatggctgatgccaccacgctgaccgaagccggttatgtgggggaagacgttgaaaacatcatccagaagctgctgcaaaaatgtgattacgatgtacagaaagcacagcgcggcattgtctacatcgatgaaatcgacaagatttctcgtaagtcagacaacccgtccatcacccgtgacgtttcaggtgagggcgtgcagcaggcgctgttgaagctgattgaaggtaccgtggccgctgttcctcctcagggcggacgtaagcatccacagcaggagttcctgcaggttgatacctccaagattctgtttatctgcggcggcgcctttgccggtctcgataaagtgattggccaacgtctgaacaccagcaccggtatcggctttggtgcagaagtgaaaggcaagaccgagaaagcaaccgaaggtcagctgctggctcaggccgaacctgaagatttgatcaaatttggtctgatccctgagttcatcggtcgtctgccggttgtggcaacgctgagtgaactgagcgaagaagccctgattcaaatccttaaagagcctaagaacgcgctgaccaagcagtaccaggcgctgttcaatctggaaggcgtagagcttgagttccgcgatgaagccttaaccgctatcgctaagaaagcaatggaacgcaaaacgggtgctcgtggtctgcgttctattgttgaagccgctttactggatacgatgtacgatctgccatctcttgacagcgtggacaaagtcgtggttgacgagtccgtgattgccgggcagtccgaacctctgatgatttatggcaaacctgaggcgcaacaagcttctggtgaataattagccagttttacagcggtttagactaaaaatgggggattttttcccccatttttttttcctcgcattcttgtcgttgaatgtcggatattcatccccatatactcagttaactacttgctgaaacccgctgactcgtgtttcacgagatttccttaacctggcggaagctaaactaagagagagctctatgaaccctgagcgttccgaacgcatagaaatccccgtattgcctctgcgcgatgtggtggtttatccgcatatggtgatcccgttgttcgttggccgggagaaatcaattcgctgccttgaagctgcaatggacaatgataagaaaatcatgctcgttgcgcagaaagaggcctcgacggatgaacctggtatcaacgatttgttctcagtgggtaccgtagcctctattttgcagatgctgaaacttcctgatggaacagtaaaagttctggttgaaggcttgcagcgtgcgcgaatcactaccttgtccgacagcggcgagcattttgccgcacacgccgagtaccttgagtcgccggcggttgacgagcgcgagcaggaagttctggtaagaacggcaatcaatcagtttgaaggctacattaaactgaataaaaagatcccgcctgaggtgctgacctctctgaacagcatcgaggacgctgcacgtctggcagataccattgccgcccacatgccgctgaaactggccgacaaacagtctgtgctcgagatgttcgacattaccgaacgccttgagtacctgatggcgatgatggaatccgaaatcgacctgttgcaggttgagaaacgtattcgcaatcgcgtcaaaaagcagatggaaaaaagtcagcgcgaatactatctgaacgaacagatgaaggcgattcagaaagagttgggcgagatggatgatgcgccggacgaacatgaggcgctgaaacgcaaaatcgacgcggcaaaaatgccgaaagatgcgcgtgaaaaaaccgaagccgagctgcagaagctgaaaatgatgtcaccgatgtccgccgaagccacggttgttcgtggttatatcgactggatgcttcaggtgccgtggaacgcacgcagtaaagtgaaaaaagacctgcgtaaggcgcaggaagtccttgataccgaccacttcggtctggaacgcgtgaaagaccgcatccttgagtacctcgcggtgcagactcgcgtcagcaaaatcaaagggccgatcctgtgcctggtaggaccgccgggggtgggtaaaacctctctggggcagtccattgcccgtgctaccggccgtgaatacgtccgtatggcgctgggtggcgtgcgcgatgaggcggaaatccgcggtcaccgtcgtacttacatcggttccatgccgggtaaactcatccagaagatggctaaagttggcgtgaagaacccgctgttcctgctcgatgaaatcgacaagatgtcttccgacatgcgcggtgatccggcttcggctctgcttgaagtgctggatccagaacagaacgtcgctttcaacgaccactatctggaagttgactacgacctgtctgacgtgatgttcgtggcgacctcgaactcgatgaacattccggcaccgttgcttgaccgtatggaagtgattcgtctgtcgggttataccgaagacgaaaagctgaacatcgccaaacagcacttgttgccgaaacaaatcgagcgtaacgcgctgaagaaaaacgagctgaccgttgaagatagcgccattatcggcattatccgcttctatactcgtgaggcgggtgttcgtagtctggaacgcgaaatttccaaactgtgtcgtaaagcggtgaaacagctgctgctggataaaaccctgaagcacattgttatcaacggcgacaacctgaaagactatctgggcgtgcagaaagtcgattacggccgtgctgacaccgaaaaccgcgtaggtcaggtgactggcctggcgtggacggaagtgggtggcgaactgctgactatcgaaaccgcctgcgtgccgggtaaaggcaagctgacctacaccggttctctgggtgaagtgatgcaggagtcgattcaggctgcgctgaccgtagttcgtgcgcgtgctgaaaagctgggcatcaaccctgacttctacgagaaacgtgatattcacgttcacgtaccggaaggggcgacgccgaaagacggcccaagcgccggtatcgcgatgtgcactgcgctggtgtcttgcctgaccggtaacccggttcgcgccgatgtggcgatgaccggtgagataactctgcgtggtcaggtattgcctatcggcggtttgaaagaaaaactgctggcagcacaccgtggcggcatcaaagtggtgcttatccctgacgaaaacaaacgtgacctggaagagatcccagacaacgtgttggccgacctggagatccacccggttaaacgcatcgacgacgttctgaacctcgcgttgcaaaatccggcgtttggtgcactgcctgtcgcggcaaaatagtgacctgatgcataaagtgtaagcaaaactgaggctggcaagtgaaaacctacttgccagcttttttttgtgccgttaagttagtaaacctgtcagaagggtgtaacgcgttctgggtcgcttgcatacccctgacaagcttgatataacagctgcgctgtcgcgtccgtagggatttttcggcgtgacgatagaattttaagaggggatgaaaacgtgaataagtcacaactgatcgacaaaattgcagccggtgcggatatttctaaagcggccgctggacgtgtgctggacgcggtgcttgcatccgtaactgattctctgaaagccggagaagaagttgcactggttggtttcggtacctttgcagttcgtgagcgctcagctcgcacaggtcgtaacccgcaaaccggtaaagaaatcagtattccggctgccaaagtacctggcttccgcgcgggtaaatctttgaaagatgcagtaaacggataattactaacaataacctgacgtctcagggttggtaaggtaatatatagggcgcatcgaagagatgcgctttttttcttatgtgtgccgaaatacttatgcgtgccgaaagttttaaatgttgcctgttaacagtgattcttttgaacaccactcaaaacgaagtgtcagtgtaaacacgcagtttattgtgctgcaccctatgggtgtcacagggatcgttggtatcctacacgcggcccaagttttaaaccccaaatacagcggagtgttgcttcactatgatggacaacttacgcgcggcagctaaccacgtcgtgctcaaaatcattcttggtttgatcgttttatcttttgttttgaccggtgtaggcaattacttaattggtgggtcgagcgactacgcagcgaaagtgaacggccaggaaatcagccgtgcccagcttgacgacgccgtgcaaaaccagcgcagccgtttacagcaacagctaggcgatcagtttgccgcactggcaggcagcgacggttatatgcagcagctgcgccagcagtcgctcaacaacctgattgacgtgactctgctggagcaatactccaaaaaattaggcgtgaccgttagcgatcaacagatcaaagatgcgattctagccacaccgcagttccagactaacaatcaattcgataacgccaaatacctgcaaactattcagggtatgggttataccgcagacaacttcgcgcagttgatgaagcaacagctggtgagccagcagcttgctcaagcgtacggcgagagcgatttcgtgctgccgattgaaaccaaatccatgtctgagctggttctgcaagaacgtgatgttcacacggcgaccttcaacgccagcgcccttgccgccaagcagcaggcaagcgacagcgaactacaggcgttctacgaccaaaacaaaaacatgtttgtggctcctgaagagattaaagttagctacatcgaaatggatgcagcggccatgcaggccaagactcaggttaccgacgccgacgtttcagcctattacgaccagcacaaaagcgagtttggccagccagaacgccgtcgttacagcgtgattgtggcgaaagaccaggcggatgcacaggctatcgatgcacagctgaaggcaggtgcggattttgctgacctggcaaaaaccaaatctgttgatactctcagcggcaagaagggcggtgatttgggttggatggagcctgaaaccacgttgccagaattcaagagcgccaacctgaccagcaaaggtcagatgtcaggcgttattaagtctgacagcggctacttcattctgcgtcttgatgacattatgccagaacaggttaaacctttggcagaagtgcatgacggtatcgttgacaagctgaagcaggaaaaagcgctggacgcttactacgcgttgcagcagaaagtgagtgatgcggccagcaatgacaatgagtctctggcatcggccgagcaagctgctggcaccaaggcttcacacactgacttctttactcagcaaaatgtgcctgctgccatcaacttcaagccggttgtacaggcgttgtttgacggttcactgattggtcacgacggcacaccgggcagtaactctgacgttatcaccgttgacggcgatcgtgcatttgttgtgcgtgttgatgcacacaaagccgctggcgtgaaaccttttgccgaagtgaaagatcaggtgactcagcttgtgaagcgccagaaggccgaagaccagtcacgcgttgatgcgcagaaactgctgatcgctctgaaagaaggtaaaggcgacgatgcgctgaaagcggccggtttgagctttggcgacgtgcagaaggttcagcgtaccgctcagccttctgacttcgagcagaacgtttatgccctgccacagccgcaaaacggcaagccaagctacggtatttctcaggatgatcggggcaataccgtgataatcaagctgaccgccgtaaacccaggcaaattgaccgatgccgaagccgcacagttcaatcagcagctgcagcagacttcatcaaacaacacctttgatgcactgctggcaaacctgcgccaccaggccaaagtgaagtttggcagcgccgcacagaaccagtaaaagtgcgaggcttcacggagccgtagtgtaactatctgcaatacccaaaggccgctttcgcggccttttccacatctgaattctgccatttgtactcttcagcgcgctgcgccactctgttggtgctgtcaacaacatggaggattacagcatgcaaagattatcaatcacgacaatggtattagcattaggtctggcggtgatgccgctgagcattcaggccgcgagcgacggcggtgcaaaaaacacggcgtccagcagcgtagaaaagtcggtggggaaagagaagtcggccggtaaggcatccgcaaaagaaacggaaaaggggctggccgaagaagaaaaggtcagcctcaataacgccagtgccgaagaactggccaaggcgttaaacggtgtcggcattaagaaagggcagaccatcgttgaataccgtagcgagatggggcccttcaccaaaattgagcaattgcaggaagtcccaggcattggaccttcattattccagcgtaatcagaaccgtttgaaattgtgatacggatcgcggcgatgaggcgaagacttttgtcgccgcgttcttctgctaatctgaaagaagtctgaccagttaacaaacttcttaagcagcaggtgtaacgctatgcaaacgttgattaaagttcgtggatttcacattgatgtttaccagcacgttaacaatgcccgttatcttgagtttctcgaaacggcgcgttgggagtggctggacaataaggaaggtttccaatggatggcgcaaaacaaaattgcttttattctggtcaacataaatatcaattatcgcaggccggcggtattgggtgacctgctgcaaatcgacagccgactcgagcagctgaacaataagagcggcgtgctcaagcagataatcacctgcaatggcgaaacggtggtcgatgcaatattaacctttgtatgcatcgacttacgcagccaaaaggcgttaccgcttgagggagagttactcgaaaagctgcgtgagttagaagaatagccgtcgtacttcgcaccgcagcagcgttggctaccctcgctcaccccagtcattggcttatgtcagctcctggggactcgttcggttgccgccttgctacagcacgaatgacttggctatttggatgccagcctcttataccagcccggttttttctttcaggctggcattaatggcttccggagcctgttggtattcttctaaccctttggcgcgcaggtggcaggctgcacactcaccacagccgtcgccggcgataccgttatagcaggtcagggtctgattacgtaccagcggcagtttgccatagtagtcagccaacgcccaggtctcggccttgtcgagccacatcagcggcgtttcaaagcggatgtcgcgcgcgatgcccagcgtgacggcgtggttgagcgctttaacgaattcgtcgcggcagtcaggataccctgagaagtcggtttcacagacaccggtaatcaccgcttctgcctgaacctgataggcatagatagccgccagcgtaaggaacagaatgttgcgtcccggcacgaaggtgcttggtaagccgttctcggcattttcgccaaactgcggcaccggaatgttatcacgggtcaggctgctaacggccagttcattgagcaggccgacgtccagtactttgtgcgctttcgcgccaagctcgacggacagcttttgtgcaatgtcgatttcggcgcggtgacgctgtccatagtcgaaggtgatgcagtgcacttcgtcatactgcgtgagcgcctgcaccagacaggtggttgagtcctgtccgccactaaagaccacaacggctcttttcatttctaaaccctttatatgctgtttaagcagcgcgattaaggctgctgttcaaagtctctacccgccaaactgcggctaatggcggtatgttactggcgtttcacgcacgttaatagcaaaaatcaatcgggctggctgaccggcggaggtaaccatgcccgacagaaatcaaaccagccccaggcggtaagctgaacgccgttaacgcccggaggcgcgctaacctggtattgatagttgaacagcggcgtaatgctgccgtgttccatcagctggtaaaaatgcgcccgtagcttctcttcccgcagtgactcggagggatgctgctgaatcgacagcaagcgctggttttgttggtcaagggcgtcgtcactgaggatggcgggccacagcgggtcctgacgcagccagttctccagtgttgcaaccggtgcttcaccaatcagacgatcgccaagcatcaggtcaacggcagtaagctgtgcggcgtcgttccagagccgacccggatgataatgcgtttctaattcgcaaccctcgtcagcaagaagggtcttcagcgctccggcgaccagttccagctccatcggtgggtgaaacagcagcgaaagttttttcggaagctgtacaccatcgtgtgtttccaacgcttccgtcgacgcgacaggcagcggccagcctggcagcatctctcggctgcgtttaaccagcgaatgatcgatgggcagattgttgagcaggccggagtggcgaattagcgcgacgattttttgagcctgtgcaggacttagcgcatttttgcgcagattgatggccagatagcaaaaccccaggctggtactgcgcttcaccggtctgacgagcgccatctgatttttttctcccagggttatccgcaccggatgctggcagctcatcttgttttttatttcgctgtcgaacagatgcggcgttatccagaactcgatggcagaaagataggggcgctgcaggtgataataaggatgctgttccagccgaacgcgctcgggcgcaaaatgtgcgagcttgaacggtcccgcgccgaccgtgggcgcatgcggatgaaacagcaggcaactgaggtcggcgagccgatgagcgaaccaatagtcgggtttttggagctgaaattgcaggcacagcgcgtgcggctgtgaaatggcttcgacgttgtcgaggctgtgtcggctgcgcggcgactgccgaaaagtttcaaacagctggcaaatctggcgggtcaacagcggctcgccgttgtgccagtaaaggtggctgcgtaaaaagaactgccacaccttaccctcatgactgatttgccaatggtgtgcgagatccggctgcggtgcggattctccggtgacgaagcgcgtcagtccggcatgaagggtgtgagcgatgtgctgctctgcgcgcccagtcagcgtctgtgggtctaatgtttgcatcgcgcgataataaggaatgcgcagagtcggggcgtcttcctgccattgaccaccaagatgtggtgccaacagcgtattaagatgctgtgagtctaactgactcagctgaagcgcggccgaatgttcgccctcatcaagcagcttttgcaggtaggattcgcgcaggctttccggcgtttttagacaggcgatttcggcgcgtttgccgcgcccggcctgtgacgaccaacggatccatccggcctgttgaaatagagccagcagggttcgcgtgtggcgttcgctacagcaaaaaatagcggccaacgcagatacggtgatcgcctgtggcacaaggccggtcttgttgtacagccgctgatattggttgaggcgattttgcaggcgcataataaatccggaagtcttttctcaaagtcgtcactatttgttcagcatatatcaggcgatactttttacagatttttattccgttaatgacgggtcagtagtacgtcttgcagatttaggcgaggcattaaggagccggaatgttgaaagagaaaggatttgagaaagcgagcggtgcggtgcgtctggcggcgttcgatatggacggcacgctgttgatgccaaatcatcaactgggcgagaaaacgctttccagcctgcggcagcttgcagaacgtggcgttacgctgacgttcgcgaccggtcgccattatctcgagatgaaacagatcctcgccaacctcgatatccccggctacctgattaccggcaacggcacccgtgtacatggtctcgagggtacactgctccacgccagtaatctgtccgaagaggtattttccgagctggtgggccgcgactggaaaacctcggccagtctgcatgtgtttcgggacgaagggtgggtaaccgaattcgataatcctgacctgttgttggcgcaccagttcagcggttttgcctatcagctgaaaaagctggcgcaggtgccaaaaagcggcaatagcaaagtctgcttctgtgcgtcccacgaaaccttgctggccctgttacccagattagagcagcattttagcgatcggctggacgtttgtttctctgcccacgactgtctcgatgttatgcccaagggcagcaataaaggcagtgcgctggcgctgttaacctcggacttggggatttctctggaagactgtttggcgtttggcgatgcgatgaacgaccgtgagatgctgcaaagcgtcgggcggggactggtgatgggcaatgcgctgccgctgttgaagcagcacgtggcgcatttgccggtcattgggcactgcaaagatcaggcggtgtcacactttttacaacattggctgaactcaccaaacctgagttattcccccgaatactaaggtcttgcggccagccgacgtccaaacgtcggcttttttcattttttgccgctcaccgagcctgatgttttatcagcgcagacccagcagtttttcgcggaaaggcgagaggtcgcctaaattttcagccacccaatgtgggttgaaataggtgtgctggtagcgctctccgctgtcgcaaatcagcgtaacaatcgagcctgtctcgcccctttcacgcatctcttcggccagctgcagagcaccccagacattggtaccggtcgaaccgccgaccttgcggcccagcatggtttcaagccagtgcacggtggcgacgctcgcggcatcgggcacctgcaccatgcggtcaatcacgctcggaatgaaagacggctcaacgcgcgggcggccgatgccttcaatacggctgctgcactgcgccactaaatctctattactctggtggaagcagtcgtaaaacaccgagttttccgggtcaaccaccaccagttcggtctgatgcccctgatagcggatgtagcggcccagcgtggccgaggtgcctccggttccagcactcatgaccagatagcgcgggaccgggtgcggctcgagcgtcatctggcgataaatgctgtcggcgatgttgttattgccgcgccagtcggtggcgcgctcggcgtaggtgaactggtccatatagtggccgttaagctctttggccaactgttccgaggcggcgtaaatttggcttgagttctcaacaaaatggcagcgaccgccgtaaaattcgatctgctgaatttttctcggcgctgtgcaggcgggcattaccgcaataaacggcaggcccaacaggcgggcgaagtaggcttcagagatggccgtgctgcctgacgatgactcgatgatcggcgtattttccttaatccagccgttgcacagtccgtataaaaacagcgaacgcgccaatctgtgcttcaggctgccggtcggatgggtgctttcgtctttcagatacagcgaaatgcctggaaagtccgcaatattcaatcgaatcagatgggtatctgctgagcgttgaaaatcggcgtcgatctctttaatagcgttttttacccaacagtcgttcattgcgtgcttccgaaaatatttgagttgatgtgcagtagcttaccttggtcagcgaggaaaaaagttgctatttttaacgtacaaaaaccaatttagagaaaatttttcttctggggagccaaatgatagataaaactgaccgtaaacttttagcgcttttgcagcaggactgcacgctgtcactcaatgagctggccgaggcggtgaatctcacttctacgccgtgctggaagcgaatcaaaaaactcgaagaggagggagttatcctcggcaaagtggcgcttctggatggtgacaaactgggcctgagcctgaccgcatttgtgaggatcaaaacccagcagcatagcagccagtggtatcagaattttgtcgaacagatcgagtcttttcccgaagtgttgtcattttatagaatggccggcgaatatgattatctgatgcaggtccaggtggcagacatgaagagctacgataacttctataaaaagttggtcagtgccgtgccggggctgcttgacgtcacctctaattttgcgatggaacgaataaagtccaccacccatttgcctctttaggcaaaaaagtttcataagaatgggcgcttatcagtgttatcctagcgcaggaaataagagaatttaaaaactaaaatcatggaaaaatctgcgtgagactgtttgcccaactggcctggtactttcgccgcgaatggcaacggtacctcggagctgtcgctctgcttattatcatcgccatcctgcaattattaccgccaaagctcgtgggcatcatcattgatggcgtcactaataaaaccctgtccgaagggaagctgtttggctggctcggcctgattcttggcaccgcaattctggtctatctgctgcgctatgtctggcgcgtgctgctgtttggggcatcctataaactcgccgttgaactgcgccagaatttctaccgtcagctcagtcgtcagcatcctgccttctatttgcgtcatcgcaccggtgacctgattgcccgcgcgaccaacgacgtcgaccgcgtggttttcgccgcgggtgagggcgtattaacgctggttgactctctggtgatggggctggcggtgctgattgtcatggcgacgcagataagctgggagctgacgctgctctcgctggtgccaatgcccattatggccgcggtcatcaaacgctacggtgaccaactgcaccagcgattcaaggtcgctcaggcggcattctcgtctttaaacgatcaggcgcaggaaagtctgaccagtattcgcatgatcaaggccttcggtttggagaatcaccagtcctcacagtttgccgaggtcgcacaggacactggcctcaaaaacatgcgcgtcgcccgcgtcgatgcccgtttcgatcccactatttatgtctctatcggcatggcaaacatgattgccatcgggggcggcagttggatggtggtcaacggtcatctgacgctgggtcaactgaccagtttcgtgatgtatctggggctgatgatttggccaatgctggcgctggcctggatgtttaacatagttgaacgtggaagcgcggcctacagccgtatccgcagtctgcttcaggaagcgccgtgtgtggttgacggcacggtgcctctgtcgccggagcgcagcgtgctggaggtcaatatcgacagcttccattatccggtaaatagcgcctcggcgctgcaagacgtacatttcaatctcgcgccgggcaacatgctgggcctctgtggaccgacaggttcgggcaagagtacgcttctggcgctgctacaacgtcagtttgatgtcactcagggcagtattacctatcaggggaaagcgttgagcgacgtggtgctcgacgactggcgtgctcgaatggcggtggtgagccagacgccattcctgttctccgataccgtggcgcaaaacattgcgctggggcaaccggacgcgacgcccgagcagatagagcaagcggcgaagatggcctgcgtgcatgatgatattttacgcctgcctcaagggtatgaaaccgaggttggcgagcgcggcgtgatgctttccggcggtcagaaacagcgtatctctattgcgcgcgcactgctgctcgacgccgaaattttgatcctcgatgacgctctcagcgcggtcgatggccgcaccgaacatcagattctgcaaaatctgcgtcagtggggcaacaacaagacggtgattatcagcgcacaccggctttcggctctgatagatgccgccgaaattctggtgttcaacaaaggtacggtggtgcaacgcggtaaccatgaaacgctggccgccagcgccggctggtatcgtgatatgaaccgttatcaacagcttgaagcggcattggatgacgttcctgcccaagaggagcccgtctgatcatgagtaaaattttgtccaaggcgccgccggctaagaagataaaactgtggccaacgctcaagcgcctgctggtttatggaaaaacgtaccgcaagccgctgtcgattgccgtcatcatgctgtgggttgccgccgccgccgaagtgcttggcccgatcctcatcagctatttcatcgacaactttgtctccaggggcacgatgccgttggggaaggtcagcctgctggctgtcacttttatcgtgctgcaaatcttggctgcctgtcttcactattcgcaggcgctgttgtttaatcgtgccgcagtgggtgtagtgcaacgtttgcgcactgacgtgatggacgccgcgctgcgacagccgcttagcgccttcgatacccagccggttggccagctgatttcccgagtgaccaacgataccgaggtcatccgcgacctttacgtcaccgtagtttccaccgtgctgcgcagtattgcgctgatcggtgccatgctggtggcgatgttcctgctcgactggcgtatggccctgattgccatctgtattttcccggcggtgctggtggtgatggcgctgtatcaggtctacagcacgcctatcgtacgtgaggtacgcagttaccttgctgatatcaacgacggtttcaacgaagtgattaacggcatgggcgtggtgcagcagttccgccagcagaaacgttttggcgatcgcctggcgcgggccagtcagtcacactatctggcgcggatgaaaacgttgaagcttgaaggctttttgctgcgtcctctgctcagcctgttcgggtcgctcattctctgcggcctgctggtgctgtttggttttagtgaggagggcagtatcggcgtcggcgtgctctatgccttcattaactacctttcacgccttaatgagccgttgattgccttgacctcccagcagtcgatactgcaacaggcggtggttgccggtgagcgtatctttgacctgatggaccgtgctcagcaggagtacggcgaagatgaaaaaccgctgaccagcggcgagatagattttcgtgacgtgagctttgcctatcgccaggataaatgggtgctggaaaatatctccctgcacgtgccttcgcgaggattcgtcgcgctggttggacacaccggcagcggcaaaagtacgctcgccaacctgctaatgggctattacccgttaaaccggggcgatattctgatcgacggccgttcactaacctcgctttctcacgcctgcctgcgcaaaggcgtggcgatggttcaacaagaccccgtggtgctggccgaaaccgtgctggctaacgtcaccctcggtcgtgacgtagacgaagaacaggtgtggcatgcactggaaacggtgcagcttgcgccgctggttaaggcgatgccggaaggcgtccacacccgtcttggcgagcagggaaataacctctcggtggggcaaaagcaactgctggcgatggcgcgcgttctggtgcaagcgcccgagattttgatccttgacgaggcaacggcaaatatcgactccgggaccgagcaggcaatttcgcgtgctttgcgggctattcggcagcaaaccacgctggtggtgattgcccaccgtttgtctaccatcgttgacgccgataatattctggtattgcatcgcggtcaggcggtagagcaggggaatcacctgcaacttcttcaggaaaaaggccgctattatcagatgtatcagttgcagctggcgggcgaagagcttgccactgccgaacaaggagaggcgctgactacgccttgatccctccgcgtaaaaccctggccgatacggttttacgcggcgtttttttcaacttgttatcttcccttttgccgatggctcgcaccaacttcatgcaatgcctcagcatgctctcatcgtcttgcaccttttctgaacgaagcgcaccaaattggtgcttcctctgctacgcttttcttattgttccccgcaggttccttgccaaaaaaccctaacgtttatctgaaaatggcgctgcccgcggttaatgagctgaatcgataattttagacacatttggcacagcctttgctttaaccacttcgtatcgggcgtgagtcgcatcacgataagctcttaatttaaggagtggcaaaatgaagctggttactgtggtgatcaaacctttcaagctggaagacgtgcgtgaagcattgtctgctgtgggcattcaagggctgaccgtaacggaagttaaaggatttggtcgccaaaaaggtcatgcggagttgtatcgtggtgctgaatacagcgtcaacttcctgccaaaagtaaaaatagatatcgccatcgctgacgatcagcttgatgaagtcatcgacgtgattagcaaagcggcctacaccggcaagatcggtgatggcaaaattttcgttgccgaattgcaacgcgttattcgcatccgtaccggcgaaaccgacgaagcagcactgtaatttgagaaacaggggtagattgataatgaaaaaacttttatccatgatggggcttgctgcggtagcgatgctgccaacgctggcaatggctgccgacccggtagccaatggcgctgataatgccttcatgatgatttgtactgctctggtgctgtttatgaccgttccaggcgtggcgctgttctacggcggtttgttgcgttctaaaaacgtgctgtcgatgctgactcaggtcattgtcaccttcgcgctggtttgcgtgctgtggatgctctacggctacagcctggcgtttagcaccggcaacgccttcttcggcggtttcagcaacgcgatgctgaaaggcatcggtttgacctcagtgaccggcactttctctcagctgattcacgtggccttccagtgttccttcgctgccattacggttgcgctggtggttggcggtatcgctgaacgcgtacgtttctcagccgtgcttatcttcaccgttatctggctgaccttctcctatgtgccgattgcgcacatggtctgggctggcggtttcctggcggccgatggcgcactggacttcgcaggcggcaccgtggttcacatcaacgcggcgagcgcaggtctggtcggtgcttatctgctgggtaaacgtgcgggcttcggtaaagaagcgttcaaacctcacaacctgccgatggtcttcaccggtgcatcaatcctctacgttggctggttcggcttcaacgccggttcagcaagtgcggcaagctctatcgcggcgctagcgttcttgaacaccgttatggcaaccgcaggcgcaatcctgtcatgggtgctggtcgagtggatggttcgcggtaaaccttctctgctgggtgcatgttccggtgctatcgcgggtctggttgctatcaccccagcctgtggtacggtcggcgttggtggtgctctgataattggtctggtcgggggtgttgctggcctgtggggcgttgttaccctgaaaaaatggctcaacgttgacgatacctgtgacgtgttcggcgttcacggcgtatgcggcatcgtgggttgtatcctgaccggcatcttcagcgccagctctctgggcggcacgggttatgcagaaggcgtgaccatgggccatcaggtgtggatccagctgctgagcatcctggttacgctggtgtggtcaagcgtagttgcctttatcgcttacaaaattgctgacatggcggtgggtctgcgtgttcctgaagagcaggaacgtgaaggtctggacgtaaacagccacggcgaaaacgcctacaaccagtaatatcgattgccaacaaaaaaatcccgtacaaacggataatgatgacatagcgcaaaaggggacgattttatcgtctcccttcttttttgctctgcgtgggttattccggctttctctggcgcatcacgccttcctgtactgtcgacgctaccagcacgccctcgcgggtgtagaactgtcctctcacgaagccgcgcgcgcctgaggctgacgggctctcaatgctgtaaagcagccactcatccatgcggaacggacggtggaaccacattgaatggtcgatggtggcaacctgcattccttcttcaaggaagcccacgccgtggggttgcagtgcggtaggcaggaagttgaagtctgaggcgtagcccagcaaatactgatgaatgcgtaaatcgtccggcatcgcgccgtttgccctgatccacacggcgcgctcaggggcttcatgtttgccttgcagcggattgtgaaacttgaccggacgcatttcaatcggccgctcgccggtaaatttctcgtgaaaacgcttggggatcatatggataaactgctttgcgatgtcagattccgaaatcagggtctcgggagcaggtacctgtggcatggtattttgatgctcaaaaccttcctctaggctctggaacgaggccgtcatgtagaaaatcggcttgccgccttgcaccgccttaacgcgacgggcgctgaagctgttgccgtctcgcaggatctcaacgtcgtagacgataggcttggtgctgtcgccgggacgcagaaaatagctgtggaaagagtgaataccgcggtcgctcggcacggtctgcttggcggcatacagcgcttggccgacgacctgtccaccgaacacctggcgcaggccgagatcttcactttccccccgaaatagcccttcttctatctcttccagattcaacaaatccaataaattctttagtgcctgactcatagctggcctcgcgaaagtagggttttttcccgtcggattgttctcataaatccatgcaaaaagaggacgaaatccattctactatgctgtctcaacaggatttatagactttatgatagtggatactttttatcagcagaagagggctttgtacctgcggtaggaataattcggatttatgtgccatagttatttatacgagtggttaaattaactattccaatcaaatcggcatgtagaaaaccggtgccgtgcagatgactataaaggagtgatcaattatgaaactttggcagatagtaggtgggaccgcactgtcttttgctctggctggttgtgctacacatcagcagatgccaccacccgattcacccaattcgactgctagcccatcaatgaggccagcgattaccggaccgaacgtctccggtgtagtgaatatctctcaacgtgtcgctctgccgcctgatgcagtattaaccgtgacgctgtcagatgcgtcaatggcggacgcaccttctcgcgtcatcgcgcagaaagtcgcgcgtacagaaggcaaacaggcgccattcagctttatcttgccgtataacccgcaggatattaaaccgaatgcgcgtatcatcctgagtgcggcagtatccgaaaacggtcgcctgatgttcattactcaggacatcaaagaagtgattaataacgcgatgggtacgcgtgcggacctgcagttggtgccagtcacatcggttccggttgcgaccaagccaaccggccttggccctatgggtaacccatattccgcaggcgctgatgcaccggttcccctccggcctctagccagccagcctattaatctgctcacttcccctgcatgcaggggaagtttttaaagcttccatccgtacttcagtaaatcaattttgcctttctgaaagataatcccctcggccaacagtgcctggcgctgtcttttaaaatcttcgccctgaagagaaatctcaccgtgacgattgaccacccgataccatggcagagtgctgccttccggcagtttcttgagcacgccgcctacctgtctcgccgcacgcggagagcctgcgagcttcgcgacgtcgccgtaggtcgtgacctgaccttccggaatggccgcaagaatctgaaacacccgttggcgaaaattgtccacttctgacatgccgatcacctttcttaaaattattcgccgttgattgtataagaaaacaacggttgtcggcagttaacttgcttttgttatggtcatccctgataatgcccaccgcttcgcagtactgaagccgtcaacgtcaatgggggccctgttggttctcccgcaacgctaacttgttaaccaggtcaggtccggaaggaagcagccatagcaggtgtcgtgtgtgccgggatgtagctggcagggcctccaccatttcagccctaccgctttgctcattctcccaaaattctcagtgatgcgtcagcgtcgcaaagtagtacaccagcggaattgccagcacgtacagaccgatcggcacttcgcgcgccttgcctgccaccaccttaatggccacgtaaaacagcagacccgccgcaatccccgttccgaaactgttcgaaatcagcgtcgccatcaccatcattaataccggcagaccctcggtgaaattggccagatccaccttgcgcagcccgctgaacatattcaggccgataaggatgagagccggcgcggtcgcctctttagggatcatcaacgccaccggcgtcaacagcagcgtcagcaggaacatcaacgccgccgccaatgcggtcagacccgttttgcctcctgcctcagcggcggcggccgactcaattagcgccgttgccgcaggaatgccgaaaataggaccgagcgcggcggcaatggagtcgaccacgaacgggcggttgatattgttcatgttgccctgttcgtcgagcagtcctgcctcgccacccaccgccagcgtggtgcccatggtcgagaaaaactccgaagcgaagaagataaacaggaagggcaggaaggcaatattcaatgctccaaacaggtcaatcttgcccagcaaggggccaacggagtgcggcagcgctatccattcgcctggaagatgggtgatgccaaagggaataccggccagcgtcgccagcaggatagcccacagaagcgcccccggcacgcggcgcgcctgtagcccaatggcgaccattaatcccagcagcgcaatcagcgcacccggtgccgtaaaatcgccgaggccaagggcgtgcgttttggcattggctatcaccagcccggcattacgaaaacctagcagcgccacaaagatgccgatggaggcggtcagacccagcttgatcgactggggcaccgagcgcgtcactacctcgcgcagcccgagtacggtgagcacaaagaacagaatacccgaccagcaggctattcccaggcctatcggccagctgataccgtcacccgccagcgtgatgccaaccagcaccgagccgcctatacccggcccaaccataaacggcagattggcatagaaggccatcagcaggctgccgacgaccaggataataatggtgccagtgagcgctgcgcctttgtcgatccccccgacagagagcaagccggggatcaccaccagaagataggcagcggccagaaaaccggtgaccccggccagacactcggttttaaccgtggtctgacggtgattaagtttaaagcgcctctgcaaccagctgccttcggcctgcggtgaggtacttttaacggaggtgtctgccatgctgtgttcccctgaaaaataaaatatttatgattatcaaaagattatttctgcttttgcgcgtttactcaatttcccacgcggcgaccagtgggttgataatttgccgggtaccgccgtcggtcagccctaaatcggtcagatgtggacccgcgttacaggccagacaggtccctcaatcgccttgaagacgcggtaaggcggctcccagtcggcaatctgtgcgctaagctctcgcaggtttttaaactgcgccgccagttcgctggccggtaaatccgagagcatgccggcaatcggcatctcgacgctggccagcagttcggcgttctgcgccaacgccatgccgccgccgcaggcaatcagatgattggctgcacgcaccatatcggccgggtttcgcccaagcaccactaaattatgtgaatcgtgggaataggtggtagcaatcgcgccgcgtagctctccccagccttcaagcagcgccatctgtggttttgccggagatttgccgtggcgatgctgcacccagatcagactaaatccggcaggcagttgagcaatgccgtcgcgtacctccaccgtggtctcattccattgagtgaagcgcgcacctttgatatggcgtagcgtggccttaccgttttgaatgcccggaatgcgtagctggaaatccgtggcctgtagcgcgttgaggtgaacggtggcgcgaggcggttgcatcgcgctgggtggcgcgctttcttcacgcagcatgtggcctgcctcggcgacgcattctccgttaacaaatacgcgagcagggcggatatgctgtagtgaatcgaaggtgaagaagtcagcggttctgcctgcggcaatcagccccaggtcgtcacgcttgaggcgcagcgcggcattgaaggacgccatccgcagcacgtcttcggcacgcagcccgcagtcgatcaatgtattgaccaacgcaatcatcccgcctctttccatcagaaaatcagggggcacgtcgtcggtgcacagggtaatttgcgacgacaggtgcggcagagcgttgagtgcggcaacaatatcaggcagcaggtaagggtgcgacccacggatttgcaaattaagacccgcgcggagtttttccagcgcgtcttcggccgaggtcagttcatggtcagagccaacgcccgccgccagataggcctgtagcgtttttcccttgagtccgcgggcgtggccttcaatcagtttgccactttgcagaccggcctcgaggatttcgagcatccgttcgctgccgttaatcactccgtgcatgtccatcatctcggcgacacctgctacttccggccagtcgagcatggtctgcatctcagcccctctgaaatcggcccccgaggtttcaagacccggcgtagaagggacgcttgaaggcgcagcgcagataacgcgcagggacagccccctgctcgactcgacggcgtaacgcacacccgcgacgccgagtacgttggcaagctcgtgcgggtcccagtaaatcgttgtagtgccttgagcgaccacaatctgcgcgtagcggtctgcggaaaggtgcgagctttcgacgtgaacgtgggtatcaatcaggcctggcgaaagataggcaccggctaaatccagtgtttcaaccgcctcaaatgcgtcactgcatggatgaacgctggcaatcatcgagccagtcaggccaatatcgacgaggcggatttcaccggtcaccatatccagcagattggcattttttagcagcttgtcgaagggcgtttttcccatagcggcctgaaccgcgcgtcgccgcagagggagggctgaactgtctgtggtcatgattaactatcgtctttaaaaaggggaatggcttactgtaggcagggcggcgggcatttgacagatgatttattttatcactggataagatggggttatgctggataacactttattaagcatcattgaatcaacggggcattatgtctgaaccctggcgcaggctccctgcgttatcgcttaaacagatccagtatttcgtgacgctggccgagctgcgcagcttcactggcacagcgcatcgactggctatcagtcagcctgcgttgagtagcgcactgcgccagatagagtcggtattggggggcaaactggtgaaccgcaccgcgcagtcggtcacgctgaccgagcaggggttggccattctgccctatgccgaaagaatgctaaacatcgcgcacaacacctttgacgatatgcagcagatcatggcgcagggcggcgacggcacgctgcgcatcgggctgattccgtcggtcagtacgctgctgtttcctgcggttcccgagttgctcgccacgcgatttccgtcgatgcgcgtcgagtttcatgacttgaccaacgatcgtctgctgattgagctggagaaaggggcgatcgattttggactgggttctctcgacagctcggtaccgccgcaaatcgaatcgtatccgctgctcgaagacccttttgtggtggtgatgcgcaaggacgacccgctggcggatgcgcaccatctgccctggcgtcatctttcgcggcggccaatagccatgttccagaaagggaacggtagccgtctggttaattctttaattgagagccatcgcttaagtttggatatcgcctatcgggtcgattttcaggaaacgctctatgggctggtgcgttcaaggctggcgttggctattcttcccgaattatatacgtcgacgcttaatgacgatgaattaaccattgtgcatctacaacagccagaattaacgcgaacggttgcgatgttgcgcacgccttcgccatttcgttcgccgcagactgaacaatgttttcaatatttgctgcaggcgtttcgtgacagagtgaaataaacccgctgcgttagtgaggggaaatgaagattaaggatggtttcaataaacggaactcattaggaggataaatgtattatcccttcgacggtgagtcattaatgacgggaatgggcagagtgacagacgcgcattgagccgatacgaatatcggctcaatgaggtcatgagcaagtcgttagcgtacgaatttccagacggaggttgggattttatcgtacagcttattcatcgtcagctcggcgagacggtgatcggccgcagagtaaaacagctccaactcatcattagagagttcgtacttattcttctcaataacacgttcaagtgtatcaatagtggtgcattttcttaaacgcatcaaatagtcgattttgttcatcatggccttttcaactgtagctaatttctttattaaattatcttttatgttttcatcagggtacagacataatccctgagaacattctgaatagtcgtttcttggttttttgccattgacgtaaatcagaatcgtttattccataattgctgaacaaggtgtaggtatcgtcgagatactcttccaccaggtcgctgaggtttgtttcatccgggtattttattttaaagctcatgacgaaagaagcaatatgctcaatcaggtcattcaactgcagattgactgctgaagttggatcattgacccagccgtgatggctgtctcccagggttgcaattccttcgtcgtacaaactttcgttgaggaaccgcagttgcgcaatatcatgtcgcttaggcgagtactcatccatatcatcccctccgtaatggttattcggtgtgataacactctgtgagtaaacaaaatctgtaaataaacaacaaaatccgtgctaaaccagggactgctaagtaaaaacgttattaccctattaaatttaaacgaccattttcaatctgtaatttaaatataatccaatttctgaaacttgcgtaaacctattacggaaacttacaattcattctctgtcgtggccgaatcaaaatctattatatcaaactccaatccttcgggtttaacaagaaatgatacggactctttagcgtcttccgctgagttgagatcaaggcaaccattgaagatggtccagtcataagtgtaagtcattgaataagattgattatttctgtgctcaatggattttatgaccagcgaaccgggtgtgtaccgagcattaggggaataataacctaaacccgcagttaatgcgtcttcaatcacttcgatattagattctattatctgctttagttccgtaatgccgggtttttttccctgagtatcgcaagggatcaattttttcatagatgctttctattttcataagagctattggcaacaaaagccttcaggattaattattgcatattttttagttaatgtgcgaaatgagagcaaaataattgccgcgaagaaaattcactaacataatgatttaaaagtattttcatgtgtttttaatatttaattacgctttcctgacggaggatgatgacagcaatgttgcaaattgggagccagatcaatgagcgaagtttactcaacgtgtttatgaatgattacaacctgctaccttgaaaaatcgttcaaaatgtggtgttatattataacatctctagagcaatccattatgactaagacgctatttaccctttctgctttctcccgctgtgctattgctttaattttattagcaattttgtggtcagggatctactgggccatctcgttaccatgattaacatttcaaagcttgaagtgggctatgaacgccgtccggttgccatgccgttgagcggacgcatcgtcgcaggctcattgacggcggttatcggcgccaacggcgcgggtaagtcgaccttcctgaaaaccctcgcaggtttgcaaccggccatttctggttcaatcgaattcagcggctcctcttcgaaaaacaaacgtccgcagctggcttatctccctcagcaggccgagctggatcgacagttccctatcagcgtgtttgacctggtggcaatgggatgctggccgcagagtggtctgtttggtggcatcagccgtgagtctgagcgtcaggtacttgatgcgctgcaaaccgtagggatgagcgagatgcgcaactttgcggtcggcgagctctccggcggtcagctacaaagaacgctgttcgcgcgactgctgattcagcaagcgccgctcatcatgctcgatgagcctttcaccggtatcgacagccagaccaccgaactgcttttaaaagtgatccgccagtggcatgagcaggggaaaacggtgatcgccgttctgcacgacattgccatggtggcgcgtcatttccctcaggtcctgttcctgagccaacagcaaaatatttggggaacggccgacgaagttctgtgccattttccccatcgcgatcatgcctgcatcctggccgacgagttcagcgagcagcggagagtcatctcatgatgttgttccacctgttagtcgacccctttgttcaatttggatttatgcgccgtgcgctgattgcctgcctcgcgttgtccattagcgcgacgccgctgggcgttttcctgctgttacgccgcatgagtctggtcggcgacgcactcagccacgcggtgctgcccggtgccgctattggctatctgatttccggtatgtcgctggtggcaatgggcgtcggcggctttattgccggtctggcggtcgccatgctttccggcgtcgtcagccgccgcacccagcttaaagaagacgctagctttgccggcttctatcttggttctctggcgctcggcgtcacgctggtttcccttaaaggttccagcgtagacctgctccacgtgctatttggctcaatactcgccatcgattctcacgccctgctgatggtcggttctatcagcagcgtgtcgatgatcatcctcgcctgcatttatcgtgcgctggtgattgagtcctttgatgcgctattcctacgcgtcagttcgggcaagtggctggcggttatccagggtatatttttggccttggtggtggtgaatctggtcgccggtttccaaattctcggaaccctgatgtcggtaggcctgatgatgcttcccgccgccagtgcccgtttctgggggcgtgatttaccgcacaccctgctgatcgccatgctgattggcatgctgtcgagcgttatcgggctcatctggtcctactacgcctcgctgcctgctggcccagccatcgtgctcagcgccaacgtcattttctttatctcggttctgtttggaacgcgcggcgggatgttgactgcctcgcgacgttagtcgtgaaaataaagaagtacttataaaggagtggaaatgaaacttttacctgttgctctgtcagtagctgccctgctgtcgagcccactggcgatggccaagacggttaatgccgtcgccagtttctcaatccttggcgatatcgtgaaggaagtgggtggagaccacgttaaggtcaccagcctggtcggcccaaacggcgatccgcacagctttgaacctgcgccgagagacagcaagtcgctggccgcgtctgacgtcgtctttgtcagtggattgggcatggaaggctggatggatcgcctgatcactgcctccggctatcacggcaaggtcgttgtcgcctcgcagggcgtagactcgcgccagatggacgaagagggcaagacagtgaccgatccgcacgcctggaacagcatggcgaacggcgtcatttatgccactaacgtgatgaacgcgctgattgccgccgaccctgaagacgccgactactatcgccagcacggcggtgcgtacatcgagcagctcaagaagctggatgcctgggccaagcaagagttcagcggtattccggtcgcgaaacgtaaggtgctcaccagtcacgatgcctttggttatttcggcaaagagtacaacgtgaccttcctggcaccggtcggcttctcgacggagtcggaagctagcgccagcggcgttgcctcacttatcaagcagattaaagacgagaaggtgaaaacctacttcatcgagaatcagaccgatccgcgtctggtgaaacagattgctgcggccacgggtgcacagcctggcggcgagctttatcctgaatcactttctggcccgcaaggcccggcaacaacctatgagaaagccttcacccacaacgtggaagcgattgtaggcagcatgaaataaatccgttacctccccgctggcaatggccaacggggaggtaattctccccttctttatgacgtaacaaagccccgtcgggcaagcgacggggctttttttttatggctggctaagctttcattccacgctgaggatcagcgtttcttcttcccgccctgtacggctttaaaacgcgggttacttttacaaatcacgtacagtctgcccttgcgtttcacgatgcggcagtcagggtgcctgttttttgctgattttaacgaactcaatacctgcatttatccctccaaaaacaaacttatttttttccgaggaagctgccgaaacgctgctggaagcgcgcggtgctgccttctttcgagaactctttctgcttgccggtgtaatacggatgggaagcagaggagatgtccagcgtcacgtacgggaaggttttgccctccagttcaatggtgcggtcggtctttatggtggagccgacgtggaaatactcatcaacgctggtgtcatgaaaaaccacggtgcgataagcaggatgaatgttctctctcataataaatcctaaaatgtaatgttatactataacaattattatgcgcgtattaacccgtcgcttcaagcctcatttttaagtttttttatcggagtagggggcaacctgctaaccgggcagggaattcaggccataaaaaaggccgcttacgcggcctttgcaggactaacttgtcagtcttgattaatgatgtggggtctcaaccttagggttgtgctccatatcttcattcttcttaccaaagcggcggcgaaccaccacgaagaacactggcacgaagaagatagccagcagcgtcgcggtaatcatcccgcccattacgccggtaccgaccgcgttctgtgcgccagaacccgcgccggtgctgataaccagcggcataacgccgaggataaaggctagcgaggtcatgaggatagggcgcagacgcatacgtaccgcctctagcgtcgcctcaatcagtcctttaccttctttatccatcaggtccttggcgaactcgacaatcaaaatggcgttcttcgccgacagcccgatggtcgttaatagcccgacctggaagtaaacgtcgttgctcagaccgcgtatcgacgcggcaatcagcgcacccacgaccccaagcggcaccaccagcatgaccgagaacggaatcgaccagctctcatacagcgcggccagacaaaggaataccacgataagcgagatggcgtacagcgacggcgcctggttgcctgagagacgttcctgatacgacataccggtccagtcatagccgatgccggttggcagtttggacgccagagactccatcattgccatcgcttcaccgctactcttgcccggaacaggctggcccagaatttccatcgaaggcaggccgttatagcgctcaagacgcggtgaaccgtattcccatttggcggttgaaaaggccgagaagggcaccatctgacccgaactgccgcgaacgtaccagttctggatgtctttaggcagcatgcggaacttggcatcaccctgaacataaaccttcttcacgcggccacggtcaacgaagtcattgacatagctgccgcccagagaggccccgagggtggtgttaatgtccgagagggacacgcccagcgccacggctttttcctggtcgatttccagcttgtactgcggcgtatcttccagtccgttaggacgcacaccggccagcaaatcaggatgctgtgccaccatgcccaacagctggttacgcgcctgcgtcagcttgtcgtggccgaggttggcctggtcaatcagctcgaagtcaaagccggtcgccgtacccagttcaacgatcgcgggcaggttgaaggcaaagaccatcgcatctttgattttgctgaactcgcccattgcgcgaccggtaatggcggcaaccttgttctcttcaccgctgcgctgcgaccagtcttttaagctcacgaacgcgataccggtgttctggccgcgacccgcaaagccgaagccgttaacggtaaacaccgagttcacgttggctttttctttggtcaggtagtaatgagtgacctcatccagcactttctgagtacgttcctgcgttgcaccggccggcagctgcgccatggtcaggaacacgccctgatcttcttccggcaggaaggaggttggcaggcgaacaaacaggaacgccatgcccacgacgatcagcagataaatgaccagataacgccccgtactgcgcaggatgttgcctatgctgtcggtgtagtggtgcgtgctctgctcaaacttcttgttgaaccagccgaagaagcctttggttttgccgtggtcgcccttggcaatcggtttgagcatggtggcgcaaagcgccggagtcagaatcaaggcaaccagcaccgacagcaccatcgcggaaacgatagtaatcgagaactggcggtagataaccccggtcgacccgccgaagaatgccatcggaataaagaccgccgagagcaccatcgcgatgccgaccaacgcgccctgaatctggcccatcgatttgcgcgtcgcctctttcggcggcaacccctcttcggccatgacgcgttcgacgttctcgaccaccacgatggcgtcatccaccaacaggccgatggcaagtaccatcccgaacattgtcagagtgtttatcgagtaaccgaaggcggcgataatggcaaaggtgccgagcaagaccaccggtaccgctatcgtcgggatgagcgtagcgcggaagttttgcaggaacagatacattaccaggaacaccagcacgatggcctcaaccagcgttttcaccacttcctgaatcgagattttgacgaaaggcgtggtgtcatacggatagaccaccttcagtccgttcgggaagaacggctgcagcttggccagctccgcttttacggcggtcgaggtgtcgagggcgttggcgttggtcgccagtttaatccccagacctgcggcaggctgtccgttaaagcgggcaatcacgtcgtagctttcgccaccgagcttgatgtccgccacgtcgcgcaggcgaacctgcgagccgtctggattaaccttcagcagaatcttgccgaattcgtcggccgatttaaggcgggtttgcgccacaatagacgagttgagctgctggcccggtaccggaggcgttccgcccagctgacctgcggccacctggttgttctgcacggtaatcgcgctgataacgtcaaccggcgtcagctgatagttatttagcttgttcgggtccatccagatacgcatcgcatactgcgcaccaaacagctgcacatcccctacacccgacacgcggctgataggatctttgacgtttgatgccacatagtcggcgatatcctcctgggtcatgctgccatcagaaacaaagcctgccaccatcaggaagctgctgctcgatttctgaacgcttatcccctgctgctgaacttcttgcggcagcaaaggcatcgccagctgcagtttgttctgcacctgaacctgtgcgatgtctgcgtcggaacctgaagcaaaggtcagcgttatctgaaccgcaccagaggagtcactggtagatgacatatacatcaggttatcgataccgttcatgttctgttcgataacctgggtgacagtatcctgcaccgtttgtgcgtcggcaccaggataggtcgccgtcagctcaatggccggcggcgctacggtcggatattgtgcgataggaagtttgaggatcgaaagtcccccgccagcataataatgatggcgataacccacgcaaatatcgggcgatcaataaagaaattagccatgaattaccggctcctttttaagacttcgtcgcttcatctgcgggggcgttctggtcaacttcctgtgctgtcacctgaacaccgggtctgattttttgcaggccggtcacgatgattttatcgcccggcttgaggccatccgtgacgacccatttgtcgccaatagcctgagtcgtcgtcaccgtacgaagttccactttattatcggcaccgacaaccatcgcggttgcatcgccgcgcgggttacgggtgatcccctgttgaggcaccagcagggcattgttgttgacaccttcgtcgagacgggcgcgcacaaacatacccggcagcaggaagtcctgcgtattcgggaataccgcacgtaaagtgatagaccccgtcgtttcatcaaccgtaacatcggagaattccaatgtgccaggttgttgatattctttaccgttatccagaatcagcgtcactttcgctttgccgttctcctgtttgagcgtaccgtcggccagctcctgcttcaggcgcaggaaatcattgctggactgggtcacgtcaacgtagatagggtcaagttgctgaaccgtcgccagcgcgtcggtctggctgctggtcaccagcgcaccctccgtcactgaggatttaccgatacggccgctgattggggcaatgaccttggtgtaggcgagattgatacgcgccgtttcaacctctgccttggccgctacgaccgaagcatcggcctggagtgcggtggagttagcagtatcataatcttgtttactgatgtagttggtgcccaacagcggcttgtagcggttgaccgtcacgtgggcaatctgcgcactggcctgtgccttcgccaaatcacccttggcgctgtcgtacgtggcctgataaggcgcaggatcaatctggtagagcgaggtaccggccttgacttcactgccttccacaaagttacgtttcaggataatgccgctgacctgaggacgtacctcggcaatacggtaggccgaggtgcgtcccggaagctcagttgttacatttagcggggcggctttcaacgtgacgacacccacttcggggctttagcggctccctgctcggtttttttatcgttacatcctgtaagagctaatccaccggttagcataagaacgaccgccagaggcgttaaccctctgtttttgttcataaataaacctcaagtgtccgattttaaaattaacttcgttgcgtgcggcgctgtgacatcccgcagctgcgtttttagtatgtgctgactacgattaccgattttgcacccatggagggtgaaaatcctatttcacaaatgtgaatttgttggggagatgtgctccgtccatgacgcacgccgggcgccgacagtccgttgcgcctacatgactgaaatgatggagagttggctttttatgccagaaagtaacgacctccacaaccaggtaagtcaatttattgatacttatatcgagatgttgaggttatgtccaagattgattaaaggtaattaagtgtgtcaagtggctgtaagtagagtttagtaaagttttacaagtttgatgctgcctgagcaccttcactgcatacgctgtagaaggggccgtgttaatattgcgcatctttatttgaattaagttaactatgtttagcctatccgctgactttcgctaccgccacgccgactttttgcgtttggcctcttcaggattaatttctttcctgttgattgcattggttttttgcgccgctatgctggctgctcctcgtgcgttagcggcgggaacggcggatatccccctgcgcggtgaagtgcagaatcaacttgatgcgctgagccgccagaaaacgctaacgccggttgaaaaactgacgcagcaggatctctatcgcacgatggaactgctcgacgcgctggatcgcgtcaaacagcagcaaaatcagctcagacagcagttggatgatgcgcctgaaaaactgcgcatcgccaccgacggcctcgccaagttgcaaaatcagagcaacccggcggcggataaaacggcgctgctggcgatgtcgttgcatcagttggaaagcacgctcggcgatacgctcaacgatttgcagtcttcgcagaatgacctctcaacctacaatactcagctgatttctttgcagacccagcctgaacgggcgcagagtgcgatgtacagctactcgcaaagcctggaacaggtgcgaaacgagcttaacggcatggcgccgaatcagcaggatctgcggccaacgcagcaggcgatgttggtcaccgagcaggcgctgcttaatgccgaggtggatttccagcgcaacagcctggaggccaacaccaccttgcaggacctctaccagaagcagcgcgactataccaatgcccatatttcacagctcgaagcctacactcaaacgctgcaagaggtggtcaacggtaaacgtctgacgctgtccgagcgtacggcgaaagaagctcagacgccggaaagcaccaccgatctgcaaaaagatccgctggtgagtcaggaactggacatcaaccgccatctgagccaacgcctgatagcctctaccgaggacggcaacaagctgttgcaacagaacatcaccatcaagaactggctggaacgatcgtcgcagtcggaacacgatctgagtgaagaaatcagcgtcttgaaggggagtttgctgctctcgcgtatcctttatcagcagcagcaaaatgcgcagccgacggccaatctgatgaccgacacccagacgcaaatcgccgatctgcgccttgagcagttcaatatcaatgagcagcgcgacgcgcttttccagggtgatgactatattcagaatctggtaaaaggcagcaaagaaaagattaatgacgacattagcgatgcgcttgagcaaatcgttgacgtgcgccgcgacctgctggaccagctcaataaacagcttggcaacgagctggcgctggcgatcaatttgcaaatcaaccagcagcagctgttgagcgtaaaccagaccctcaacgacacgctgacccagcaaatcttttgggtcagcagcaacaagccgattgactggcagtttattaaatcgctgcccgaagacgtcaaaaatcagattaacagtctgagtttcaagctgccggttgacgagctgaagcagggcgcgctgcgctcgttgccggtgaccgtgccgatgctgatagctgtcgtcattcttctgtggcgtcagaaggctatcaaagcgcgtatcgataaactgagcagcgacgtcggccaattgaagcgtgattcccaactgcatacgcctcaggcgctgctccttctcgttctcagagtgatgccgggcatgctgctgacgctcggcgttggctattggctgtccgtttgtgatatcgagtttaataactttttatggacgctggcacagcgcatcgccgtgttccagctggtgatgggattctgttaccgactgctggggccgcgcgggtcagtgagcgccactttaatatggaagcggccacctgcgcgcattaccgacgctcaatcctgcgtctgtcactcaccatgctgccgctgattttctggactgttcgcggtgagaagatcccgctggggctggtggacgatactatcggtcaggtgattattttactgacgctggcgacgctgacggttctgctttttccgatgttcagggacggctggcgcgagaaaaatgcgcacagcgtgcatctggttatcgtcaccgccattgcattggctccggtcttcctgatgggactgatgttcaccggctacttctatactaccttgcgtctcgccagccgctggctagaaagcctctatctgctgataatctggaatatcaccggcaggatagcgctgcgcgggctgagcgtggcggcaaggcgtctggcctatcgtcgtgcgctggcgcgtcgtcagaacaccaatgtcaaagagggtgccgaaggggagaccatcgaggaaaccgtgctcggtctggaccagattaaccagcagacgctgcgtctgatcaccatggcgctgttcatcgtctttgccgccgtgctgtattgggtgtggtcagatttgctgacggttatctcttatctcgacagcatttcgctgtggcattactccggtaatatcggcggcaaggtggtacagcagacggtgacgctgggcaatttcctgttggcctttatcgagataatcattgcctatgtcctgacgcgaaacctgccgggcctgctcgaggtgctggtgctgtcgaggctgcatctgcggcaggggacctcctacgcgattaccaccattctgacctataccattacggttatcggtgcggcagtggcgctgagtgcgctcggcgtgtcgtgggacaaactccagtggctggtggccgcgctgtcggttggactgggctttggtttgcaggaaatctttgctaactttgtttcgggcctgattattctgttcgaacgcccgattcgcatcggcgatacggtcactatcggacctattctgggacggtcagcaagattcgtattcgtgcgaccaccattaccgactttgaccgtaaagaggtgatcatccctaacaaggccttcgtgaccgagcgtcttatcaactggtcgctgtcggacaccgtcacccgcgtagttattaaagttggcgtagcctatgggtctgatttagataaggttaaggagattttactgcaggcggcgcatgaaaatgccaaggtgatgagcgatccttcgccgtcggtgtacttccttaacttcggggccagcacgctggaccacgagctcagggtatacgttcgcgagctgcgcgacaggagttcgaccgtcgatgagctgaaccgcagcgtagaccagctgtgccgcgataacgatatcaatattgctttcaatcagttggaagtgtatctgcacgacaaaggcggcaacgaagttcaggaagtgaaacgcccattcacgccgccggacgaggcgaccctcgtctgattcataccgtcgttatcggtagcttatggacaagctgccggtcggattcttgagtttttcctgatagtcctttttgacaatctccagtgccgccaacgccacttcaggggcgatttcgttacactccagcaggtagatcagatctacggctagttgcagttcgggaggggcgttttcaatggacataggcgttccagtcatcttggtagtgggcatctgttttatcagtcgttaacaggctgactaacgacgggtaatcgaatttccagtatagagattttgtctcaactaacgacggtatttttcaaattttgtgataagagcgtcaaaaacccctttcctgacgctcgatgctgcgctcgattttgatcagcgcctgacggcagcgcatgaggcgtccctccagtgccgcaagctctttctgcatatgctgctgttccttgaaagtctcgactctcccaagacgactctcgcggtcttgaatcatcgccagcaatcgacgctcatactgttgatgttcaaccagtttactgtagtaatcgccgccgctttgttctttctgtttatcggccttgcgcaggttctgggtcgcgagttcgcgctgtagtgcggtgatttgcgagaccagccgctcggcgacaaaggcgacctgcgcgctgcggttttcttcgactacctgacgcagctgagcaaagtttacgcgcacttcggcaagatattcacgcaggcgggttcccttggtcgcaaaaagcgtaacgtcaaagcgcgcctgctgcgccggtgcatgggcgacaggttcaatttcttgcgccagattttctatctgctgctccagcgaatgcaaaagtgtttgcgtgctcaacgagactctcccgaacgattatttccgcgattatgcgacaaactgcgcggtaaatcatgcgttgtgggcggtttatcacgcactgattcgccgcagtggttgacctggggcaataaaaaaggcgatcatcgccggctgtaggttgctttttaaagtggctttgcataaatttgggcgtcttgaccctcggtcatccccaacttatttttcttgaaccgcctgccagagtcgttcgccgtcgccttaagctcagttagctattccgaattatctcggcgtagggcgtttggtttgaacagattctcgcgccgttcaggtatgaaccgacgctttttcaggcctttattatgagcgctaccgttatgaccgctactgcacagcagcttgagtttattaaagacagtatcaaaaccatccccgattaccctaagccgggcatactgtttcgtgatgtcaccagtttgctggaagtccccgaggcctatcaggccactatcgatctgctggcagagcgttaccgcaataccggtgtcaccaaagtggtgggtaccgaagcacgtggcttcctgtttggcgcaccggttgcgctggcgctgggcgtaggcttcgttcccgtgcgtaagccgggcaagctgccgcgtgaaaccatcgcggaagaatacgcgctggagtacggcaccgataagctcgaaattcacaccgacgctatcaagccaggtgataaggtgctggttatcgatgacctgctggcgaccggtggtaccatcgaagctaccgccaagcttatccgtcgtctcggcggtgaggtttctgacgcggccttcattatcaatctgccagagctgggcggtgaaaaacgcctgaacggtctgggcattgaatgttactgcctggtgaacttcgccggtcactaaaattcggcgtccatcgcgttacggtggggctttgcacacctcggtcactgatgcatttcagcgtccgggaacttgtgcagttaccctacctgtcaacccgaaggcactagaatttcttgtttatatcaggcctcgcccgtgcaggcggggctgtgataacataacgctacagacccctcgacttctccggtattaatgagctatcaggttcttgcccgtaagtggcgcccccaaactttcactgacgtagttggtcaggaacacgtgctaacggcactggccaatggcctgtcgctggggcgaattcatcacgcctatcttttctccggcacgcgcggcgtgggtaaaaccactattgcccgtctgttggctaaaggcctgaactgtgaaaccggcattacctcagcgccctgcggcgtttgcgacaactgtcgtgaaatagagcaggggcgctttgttgatctcatcgagattgacgccgcatcgcgtaccaaagtcgaagacacccgtgaattgctcgataatgtgcagtacgcaccggccagagggcgtttcaaagtctatctgattgacgaagtacacatgctctcgcgccacagcttcaatgcgctgttgaaaacgcttgaagagccgccttcgcacgtcaaattcctgctcgcgactaccgatccgcagaaactgccggtcaccatcctttcacgctgcttacagttccacctgaaggcgctggacgtcgaacagatccgcaatcagctggctaaagtgttgcaggcagagcaaatcgacaacgaggcgcgcgccttgcagctgttggcccgtgcggccgatggcagtatgcgtgatgcgctcagcctgaccgatcaggctatcgcgatgggacagggcaaagtcaccaccgagaccgtggcgcagatgcttggcaccctcgacgacgaacagccgctggctattcttgaagcgctggtgagtgccgatggcgcgacggtgatggcgcaggttgaacaagccgcctcgcgcgggtggactgggaaacgctgctggttgaaaccctggcgctgctgcaccgtatcgcgatggtccaactgctgccgtcggtgctggataaccactatgcggctatcgaacagcgtctgcgcgaactggcgcgggttattccgccgaccgacgtgcagctttattatcagacgctgctaattggccgcaaagagttgccgttcgccccggataaacgcatgggcgtcgagattacgttgctgcgtgcgctggcgttccaccctaaggtgttgattgccgaaccggccgccagagaaccacgcaccgctgcaccgcagccgatgtcgaactcggccatgcctgcgcaaaatgcccctgcgcagcctaaagccgcccctgctcaacaggcgtctgcgggcggtgacgtcgcaatacctgactccaccgcgcagctcttgcaggcgcgaacacagctgcttcgacagcagggaagctcatccccaaaaaaagctgagccggccgcgcctggaaaagcgcagccggcaaattcggtgctggagcgactggcttccgtcaccgagcgttcattagaacgcacgggagcgactgcgcagaagaaagcccccgctgcgccggttaaagaagaggcttatcgctggaaaacagtgaatgagcctgaggccgcccctgagccggttgccacgccgaaagccttgcgcgctgcgcttgagcacgaaaaatcgccggagctggcgacacgcctggccgaagaggccatcgagcgagacgagtgggcagctacggtcaataagctgactattccgaaactggttcagcaactggcgctcaatgctttccttgagcggcctgattcggctacagtctgtctgcatttacgttcttcgcagcgtcatttaaactcgccaacggcgcaaaaaaccttggcagacgcgcttgcctcgctgtatcagcaggagatagcgctgaacgtggttgaagacgacaacctggcgatacgcacgccgctcgaatggcgacaggccatctatgaagaaaaactggcgcaggcgcgtcagtcgattatcgcggataataatatccagactttgcgtcgtttctttgacgccgagctggacgaagagagtattcgccctatttaaccgccgcagtaggagcatggtgcacatacgcggcccgacgcaaagagagaagattatgtttggaaaaggcggcattggtaacctgatgaaacaggcccagcaaatgcaggaaaaaatgcagcaggcacaagcggaaatcgctgccatcgaagttaccggtgagtctggtgcaggtctggtgaaaatcaccatcaacggcgcacacaacgtccgtcgcgttgaaatcgacccaagcctgctggaagatgacaaagacatgctcgaagatctggttgctgcagcattcaacgacgcggctcgtcgcatcgatgaaactcagaaagaaaaaatggcagcagtttctggcggcatgcagttgccaccgggctttaagatgccattctgatgcaaaccagcccactccttgaatcattaatggaggcgttgcgctgtctgccgggtgtaggcccgaagtcggcgcagcgtatggcattccagctgctgcagcgcgatcgcagtggcggaatgcggctggcgcagtccctgactcgggcgatgtccgaaatcggccactgtgccgactgtcgtactttcaccgagcaggatgtctgcaccatttgcgccaatccgcgtcgcaaggaaaatggtcagatttgcgtggttgaaagcccggcagatattcatgctatcgagcagaccggtcagttctcaggtcgctattttgtcctgatggggcatctgtctcctctcgacggcattggtcctgacgacatcggattaggtcgtctcgagcaacgtcttgaaagcgaaagtattcaggaagtgatcctcgcgaccaaccccacggtcgaaggtgacgctaccgcgaactatatcgccgagatgtgcggtcagtatggcgttctggcgagtcgaattgctcacggtgttccagtgggggcgagctagaaatggttgatggcacgactcttgcgcattctctggcaggtcggcacgccttcaaatattagtttgctcggttatcgtatttgaagctgtagcggcgttggctgcgctagcccgccccagtcactggcttgtgtcagcgcctggggatgaactaacctgccgccttgctacaacttctataacccagaccggctgttttttaaaatcccaccttggtcacttccacaatcaggcagtctgttaaaaagccttgtttcagtatttccaaagcgttagcggtttattccctgctgattctaaaataatcaattaacgcgcgtttcgatatttccttgcccgttcctcttgaaaatctgcctttaccccccacttcatactcagtctgtttttacagagttacgtttttaaccactcaaacggtttgattgaggtatttgatgagtatgaaaggacaagagacccgcggattccagtcagaagttaaacaactgcttcacctgatgatccactcgctttattcgaataaagaaatcttcctgcgtgagctaatttccaacgcctcggacgcggccgataaactgcgtttttgcgcgctgtcaaagcctgaactttacgaaggcgacgccgagctgcgcgttcgtgtgtcgtttgacaaagaaaaacgtaccctgacgctgagcgacaacggcatcggtatgacccgtgatgaagtgatcgacaacctcgggaccattgctaaatcgggcaccaaagccttcctacagtcagtcggatccgagcaggccaaagacagccagctgatcggccagttcggcgtgggcttctactctgcgtttatcgtggctgataaagtcaccgttcgcacccgtgcagcaggcgttagcgccgatgaaggcgtattttgggaatctgccggtgaagggaatacaccctggccgacatcgagaaagcctctcgcggcaccgaaattaccctgcacctgcgtgaagatcaggacgagttcctggacagctggcgcgtgcgttccattatcagcaaatattctgatcacatcgcactgccggttgaaatcgagacccgtaacgaagaagacgataccgttacctgggagcagatcaacaaggcgcaggcgctgtggacgcgcggtcgcacagaagtgagcgacgacgaatacaaagagttttacaaacacctctctcatgactttagcgatccgctgagctggagccacaaccgcgttgaaggtaagcaggaatataccagcctgctgtatatcccttcacaggcaccgtgggacatgtggaatcgcgaccacaagcacggtctgaaactgtacgtgcagcgcgtctttatcatggacgaagccgagcagttcatgcctaactacctgcgctttgtgcgtggcctgatagactccaacgacctgccgcttaacgtttcccgtgaaattctgcaggacagccgcgtgacgcagaatttgcgtaatgcactgagcaagcgtgcgctacagatgctcgaaaaactggcgaaagacgatgcagaaaaatacctgcagttctggaagcagttcggtctggtcttgaaagaaggtccggcagaagacagcagcaacaaagaaaccatcgccaagctgctgcgtttcgccagtacccgcaatgactcttccgagcagacgctgtcgctggaagactatgttgccaacatggttgaagggcaggacaagatttacttcatcaccgccgacagctatgccgcggcgaaaaatagcccgcatcttgagctcttccgcaagaaaggcattgaagttctgctgttgtcagaccgcatcgacgaatggatgatgagctacctgaccgagttcgacggtaaggtgttccagtctgtgagcaaggccgatgagtctctcgacaagctggccgacgagaagaacgaacagcagaaagatgccgacaaggcgcttgagccgttcgttgaacgcgtcaaaaccctgttgggcgatcgtgttaaagaggtgcgtttaacgcatcgtctgaccgacaccccggctatcgtcaccaccggtgcggacgagatgagcacgcagatggccaagctgtttgccgctgcgggtcaagaagcgccagaggtgaaatacatctttgagctgaaccctgagcatgcgctggtcaagcgtgctgcagatgaaacccaggagagccagttctcagagtgggtagagctgctgcttgaccaggctctgtttgcagagcgcggtacgctggaggaccctaaccagttcatccgtcgtatgaacaccctgctgcaagcgtaattaattgaaatattgacctaataagaggccagacggttaaccccggctggcctcttccaatagccagtggcggaaaagcgtgatctctttctcgtggctacgcgaacgtttcaccagcatataggtggctctgtcgacctcggtaaagcccagcggcgcaattaaactcccttcctgaatctcttttttgaccaaaatctgcggcgtcataataattcccaaaccattttttgcggcctgaatggccagcgtcaaattgtcaaaatgcttgcccgaaataaagtctccccgcgtattggtttttcttgcccattcttgccaggcattgattttggtgtcggcatgcagcagtggaagggtggcgaagtcggtctcgtaggtaaatcgatgacggaaatctggcgaacagacgggcccaatataatcgacggtaatcagcgtcgcctctatttcatccgacagcggtgtttcattacttttgattaaaatatccgtgcgttcatcctgaatattttcaatgtttacatgggtctggaatgtcagggcgatattttcatgccgttgcgaaaaacgcgcgatacggggaattaaccactgtgacaagaaactgggcgcgcaggaaataataagactgttctcttcgcgggtttttatttctttgcaggttgcctcgatatttctaaatacctgttcacagcatttctttaaggtctctccgtcctgggttaaataaacccgtccggccgtgcgtttaaataaaggcgtccctaaccaggactcaaggttctttatttgatggctgattgcactgtgagtgatatttaaggattcagcggcggcgctgaagctttcaaacagtgccgcctgtttaaagtagtgcaacgcgcgcagtgaagggagatcagacatagcgccaccttgttagttaatttcaacttgtctgtctgtttatatcattttctaacgtgaaaaaaaccctttagtctcgaccttgtcccaaaacgagtcgccaggatggcggagctagtcttagtaacgagcgtggcgggacaacctataaccctttaaaaccgtgcctttcacccgggtattcagacaatattaaggatcaatatgaataatacttccgtaaagactcagcttgtgatgtttaccggtggtcgtgacagtaccttggcagcttgttatttaatgttacagggtatcccggttcatctgtactccgctaacagcggttgctccctgcatcgcggcattctttctcatcgtgttgatgaacttaaaaaccgttttggtgaattggtcgtggaacacacggttgaagatattagcgggacgttccgcagtatcgctatcgagaatatcgaaggagatattctgaagtatagaaaaaatctggtgctgctcggcgaaaaattggcaatacacgcacatcttattgatttctgtcgtcgtcatgatattgacgtcattaatgacggcattacccattatcagcaggaattcccggagcagcgtctggtcgcgaaagaatatctggtcgatctgatgaaagaattcggcattcagtatcactcacctatatatgaatttgcccagtcttccgacgacgtgaaatatcgtctgctgcagcttgggatctccaccaagtcactggaaggtgtgagcatcttcggtgatagctttaccaccccaagcgacgacaccattctggcctacctgcgcgagaaaacgccgctggcgctgaatattgtcaaattcctgtcgggtgaaaccctgacgttggccaagaaagtggccagctctcccgctgaagctgcctgagtggagcctgtgatgaaaactatcatcaagtgttcggcgattattattcgcaaccgttcgctgctgttgacgcgtaaagaggggaccgacgtgtttatttcaccgggcggaaaacctcttcagggtgaggatcacctcacctgcctgcgccgtgaacttaaggaagagctcaacgttgaagcggcagaaatcaagcctttcggcctgtttcatggcatcgcggagttcgaatccgtagccatcgagaaccacgtttatcaggttgaagtcgtcggtcagcctgtcgccagctcggaaatcgccgagattgcctgggtcaattaccgtaagccgccttgcgaagtcggcgtgggctcagtgtttcgcgacaacgtgcttcctttgctctaccagaaggagttgatcgactaatggatccttcagcattgtcaccccagctccagaagctgcacggcggcggacacttctacaaaaaagtgaatcagctgcgtgaagttctgcgggagaaattcaccgaagtttaccgtctggagcaatacgatgtgtttatggtgcagtcggttagcgtcgggttggcgatgctgtcccacttactacataagcaaaatatttcactgagcctggcgaatcatcagcattatcagccgattgatatgctctttccccacgcagtggcggaaggcagagaaaacagcggcgtgcagattgtgacgcacgttaacccttacaccggcgagttgaaccgacttcatcatccggcgaagggcatcgtggtggacgcatctcacagttttgcgaccaacatgcatgatgacctgattaagcagggttcgatatttttagcgccgttgcacaagcacgcctcggtcgcggtaggcctgacgctgattgcggtgcgcccggaagagtacagcatgctgctacgcagcgagctgcgtctcttcgagcgagcgacggtgtcggaaaccccgctcacgatggcgctcgaaacgattaatacccccgggtggcagccctacaacgttgccagcgtggatgccatcgatctttggctgcccgacggcgaaagactgcagtcaatcggcgaaccgggtctgcctttctgctgtttcaaggtgccgtcgttttcgcacgagcagcgcaaggcggtgaaggagatgaacggaagctatttcgaacatagcggtaccctccgcttgtcccgctggatgcgtggaaagcatggacggccggtaaattgtaccggcagtgtttttgaagatatttcaaaactatggaatataagatgagtaaatcaagtgcagtaaacggtaacctgatcggcattctcggtggggttattctcagtaccgattcggtatttatccgtctcatggcagtgcataattcgtggctgattgtggtgctgcggggattgctgatgtgggcagtggtctttgccgtgtggttgttagtccccaagagtcgtgcggtgctgggtgtgccgtggataacccgacaaaacctgctctcagtactgtttttctgcgcgtcgtcggcctgtttcgttaacgcgcttaatcgcggcaatgtggcaaccgttctggtgattatctcttcaacacccttcgtatcggcgattatttcgcggctgttctttgccactaaaattgacaagtcgctaatggttgcggcggtagtcggtatgctcggcgtggttatcgtgatgtcaggaaggcaggcgggcgttgatgcaaccgccaactactttgctctggcaactgccgtctgtatggcgctggcgtttatctttgcctcacgcgtcgagcagggcacgttgggactgccttcgctcggcggcgtgctggcctcggttgttgtgcctgcctttgccggtactggcctgctgacaaccgttgctgacctgcatgcagagcagtggctgtggctggttattgaaggggcactgatcattcctgttgccatgggtctgatttcactttctacccgctatgtgccaccggcgaatgctggacttttcctgttgctcgaaaccgcgctggctccgctgtggatttatgttttcctgaacgaagcaccgacgccaaacgcggtgatcggtgggtgtatcattatcgttgccgtcatttcgcaaaccttgcaggctaaaaaacagacagccattgcctgatagttggcgtttaatcgctaacttgccgcccctttcttgaggaaggggcgcagaatggtatggttgaccgttttcgactttttataaaattacatgcaaggggatttacgcaatgcgtatcattctgctgggcgctccgggcgcaggtaagggtactcaggctcaattcatcatggagaaatacgggattccgcaaatttctaccggtgatatgttgcgcgcagctgttaaggccggaagtgacctcggcaagaaagccaaagaaattatggacgccggtaaactggttaccgacgaactggttatcgctctggtaaaagaacgtattacccaggaagattgccgcaacggtttcctgctggatggtttcccacgcaccattccacaggccgacgccatgaaagaagcgggcatcagcgttgacttcgttttggaattcgatgttcctgacgaactgatcgttgatcgtatcgtaggtcgtcgcgtgcacgcaccttcaggccgcgtttaccacgttaaattcaacccaccgcaggttgaaggtaaagacgacgtgaccggcgaagaactgacgactcgtaaagacgatcaggaagaaaccgttcgcaagcgcctggtcgagtaccatgagctgaccgagccactggtttcttactacggtaaagaagcagaagccggcaacacccaatacgttaaaatcgacggcacccaaaaagtgtctgaagttcgcgaagaactggctgcgatcctgggttaatttcctgcacggtacgcaaacgttatcagaggcgacttaggtcgcctttgtttttccctcatttcccccttgctgatagcattgattgttaatcccatttactgttatcggttccgatttgcctgagtttggttacaataaggtcgcattcagacaggtcacttgccctgtgttaaaaaattagcaatattatttagggaattcagcatgatgcagacgaaattcggtgtgttactggtcaacctaggaacgccggaagctccaaccaccccgcggtaaaacgttttctggctgaatttttaagtgatattcgcgttgttgataccaatcgactgatttggtggccgatactgcaaggcgttatcctgccgttccgttcaccgcgcgtagccaaactgtataaatcggtatggatggacgaaggttcgccgctgatggtctacagcctgcgtcagcaaaaggcgctggcagcacgtttcccggataccccggttgagctggcgatgagctatggcaaaccaagcctcgaagatggcattggccgcctgatagagcgcggtgtgactaaaatggtggtattgccgctttatccacaatattcctgttcgaccagtgcctcggtatttgacggcgtagcgcgcgtgcttaaggagcagcgtcgcctgccttctgtcagttttatccgcgattacgctgagcatccggcctacatcgccgcgctaaaggccagtattctggaatcctttgagaaacacggcgaaccggaccgcctggtgctgtctttccacggtattcctaaacgtttcgtgacgctgggcgacgactatcagcagcgctgtcaggcaaccacgcaggcgctgactacggcgctgcaactgcccgccgggaaaatcatgctgaccttccagtcacgctttggccgtgagccttggttaacgccgtacacagatgaaacgatggaaagcctgccgggacagggcgtgaaacatattcaggttatctgcccgggattctccgccgactgtcttgagaccatcgaggagataaacggcgagaaccgcgagctgttcctgcacgccggtggtgaaaagtttgagtacattgaagcgcttaacgatcgtaacgatcatatcgacatgatgcagcaactggttacgcaacacttctagtcctgccagactcgattatccggctgacgcgcacgccatccggataataactctcctgaatccattgttttcgtgtgataacattcgcgtctgtctcactgcccgtgcccaaacttcatgaaatttcccggtaaacgtaaatccaaacactatttccccgttagcgcccgcgatcccctgctgcgtgactccatgttgcatgagtcggtgcagaaaaatatgcataccgagccagaggccaatgcttcttacatcgtaggcatcgatcagacgctggtggatattgaagcccgggttgatgacgaggtcatcgcgcgttacggcctcgtcgcggggcagtcgagcctgatcgacgacgacagcgccgagcgcctgtatcaggagttggttagtcagtctctgattacccatcagtttgccggtggcaccatcggtaacacgctgcacaactattcggtgctggccgacgaccgctctgtgctgcttggcgtgatgtgcagcaacgtgaagattggcagttacgcttatcgctacctgtgcaatacctctagccgtaccgatcttgactacttgcagggcgtcgatggcgcgattggtcgctgttttacgttgatcaatgaaagcggtgaacgcacctttgctatcagcccggggcacatgaatcagttgcgtcctgagagcattcctgaagaggtaatagccggtgcttcggcactggtgctgacttcttacctgctgcgcggagaagcgggcgatcctatgcctgaagcaacaaggcaggcgatcaagtacgcgaagaagtaccaggttccggtggtgttaactctcggcacgcagtacgtcatcgccgacgatcccgaaggttggcgcgaatttatccgtgaaaatgtgaccattctggcgatgaacgaagatgaggcctgcgcgctgaccggcttgggggatccgctgatggcggtcaatcaggcgctggagtgggccgatttggtgctgtgtactgcaggtccgagcgggctttatatgggcagctacaccgaagaggccttcaagcgtgccaccaatcatccgctgttgccgggtgcaatcgccgagtttaaccagtatgaatttagccgcgcgatgcgtcgtgaaagctgcacccaaccgctgaagattttctcccatattgcgccttatatgggcggacccgagaaaatcatgaacaccaacggggctggcgatggcgcgctttcagcgctgctgcacgacattgccgccaacggtttccatcgtatgtcggtaccaaactccagcaaacacgcgcgcgactatctgacctattcgtcattggcgcaggtctgtaaatacgccaaccgcgtaagctatcaggtgctgaaccaacactctccgcgcctgacgcgaggtttgcctgaaagagaggacagtctcgaagagtcttactgggagtactaaaaatcctcgtcgccctgaacaccgtagcggcgttggcttctttcgcgcgcccgaatcactgacttatgtcagctcatcgggacttgctcaattgccgcctggctacggtgtccatggcttcgaggattaacattaagcgtccctgaacaccctagcggcgttggcttctttcgcgcgcccgaatcactgactgatgtcagctcatcgggacttgctcaattgccgcctggctacggtgtccatggcttcgaggattaacatcaagcgtccctgaacaccctagcggcattggcttctttcgcgcgcccgaatcactgacttatgtcagctctggacaccgaacctaggttagtcgtcaaatcgtgcaaccttcggctctgggcggcatcgccatcccgatgttgatcgagtcgagcatattgttggctatctcgcgctcgcccatcacgaccttgtccgcccgcgtgccatgatgtaggtcacttcatcatcgtagtgcgcgcgggcgattatctcgatggtcgggcgtttggcccgcgccgaggcgatgatttccccagactcatagccgtttggaatggttagcagcagccagcgggcacattccagaccggctagcgtcataatttcctgattagccgcattgccgagtaccgcactgatgccctgttcgcgcagcgcctctacgcgtggtcgggaattttcaatcaccaccagcgggatcccctgctgtatgagcttggcacccagcagactgccgacgcgtccgtagcccacaatcaaggcatgatcgcagaatgcgaccggcgtctgtgcttcgtcttccacgatttcctcaagactttgatcctcaatgacctcggttttggcgagatagctttccaggagggaaaacagcagcggattaagcattatggagagaattgaacccgcgagaaccaggttacgcgcgtgttcagacagcatgcctaacgagatgcccaacccggcaaggataaaggcaaactcgccgatttgcgccagactcacggaaatcgttaatgccgtgcgctgcgaatggccaaacattttcaccagcaggaaggcggccgcagacttgccaaacaggataatcgccagcgttgccagcacggccagcggttcatgaatcaggatcatcgggtcgaacagcatgccgaccgagacaaaaaataacactgcaaatgcatcacgcagtggcagggtgtcatgtgctgcacgctggctcagctcggatccgttaagtaccatacctgcaaagaaggcacccagcgcaaacgaggcatcaaagaactctaccgcgccaaaggcaataccgagagccagcgccagaaccgccagcgtaaagagctcacgcgaacccgtgctagctgattttgccagtatccagggcaccagacgacgaccgacaacaatcattagaataataaaggcgaccactttgccaagcgtgatggctaattcagtaaacagctggccgaaactgacgtgctgattgcccatcatattgctgatggcggggagcaggactagcgtcaacaccatcgccaaatcttcaactatcaaccagccgatggcgatttgaccgcgttgactgtctattagttgccgctcttccagtgcgcgcagcagtactaccgtactggcggtcgagaggcagaggccaaataccagcccactggtcagatcccagccgagaaagtgcgaaaggcccatccccaacagcgtcgctacggcaatctgagcgatggctccgggaatagcgatagactttaccgctaacagatctttaagggagaaatgcagcccgacgccaaacatcagcaggataacgcctatctcggcgagttcgggagccagtgaggtatctgcaacaaaaccgggagtaaaaggacccgccaataccccggcggcgagatagccgactagcggcgaaatacgtagacgattggccagcatgccgagaagaaaggcgagaaccagcccgccaacaattgtcgtaatcaatggggtggaattatgcatcaagattccctctcgttatgcacggaacagcgtgaacctggtgttttcagtttaagttaaaaaattaattttaggtgagaaattaattttaaaaataagataaatgcgagggatactgataaaaccttatgaagggaatgtttgtattacattaaggtgaaaaaggctgataaagcacgttatcttgcgatagaaaaagtgcaatatcagcctaatgaaatgacatagagcgggtctttacgtagatttacgttcgagattcggcaggaacgcggtcaatatccctaaaagcggcaggaatgcgcaaatttgatacaccagctcaatgctggttttatcggccacgtagcctaataccgccgccccagaccgcccatcccaaacgccagaccgaagaacaatccggaaaccatgccgaccttgcccggaataagctcctgtgcgtagaccagaatcgccgaaaatgccgaggccagaatcacccctataatcacactcagaacgctggtccacagcaagttggcgtgtggcagcagcagagtgaagggcgcaacaccgaggatagacacccaaatcacgtatttacgaccaatcttgtcgccaatcggaccgccaagaatcgtgcccgccgcgactgccagcaggaaggcgaacaggtggaactgcgcctcctgaatggaaacgccaaacttgtgaatcaaatagaaggtgtaataactgctcagactggtcagatagaaatacttcgagaaaaccagcaccaacagaatagtcagtgacttcacgacggtacgttttggcaagagactcacggcgaccggtgctggtccacgcttcttcgccagctgttgctggtggctataccagcggctgacctgtaacagcacgaccatacccagcagcgcggccagagagaaccaggctacattaccttttccataaggtgcgatgataaccgcggccagcagtggccccagggcgctgccgaagttaccgccgacctgaaacagcgactgtgccagaccgtgacgcccgcctgaggccatacgtgccacccgcgaagactcgggatgaaacaccgaagaaccggtacctaccagcgcggcggcgatgaggatcacgccaaagctttgcgcgaccgccagcagcagtagacctgcaagcgtaaagcccatgcccaccggcagggagtagggcttcggatgcttgtcggtgtaatgaccaattaacggctgaagcagcgaggcggttacctggtaggtcagggttatcatgcctatctgcgtaaaactcagagtgaactctttttgcagcaggggataaatcgccagaatcagcgactggagcatgtcgttaagcagatgtgagacgctgatggcggtcaacaccttgaaggcggtgccttttaacgcactctcctttggagggattttggattctatgctatctgtcattggaggctcattattatatatttgcagggtgaattcagcgtagtgccgtcaatctcgtttagcgatatcggcgaagcgcccgtttaataattgacacaaatccgctgccgagagctcaagatcgaggccacgtttgccccggagacaaaaatagtcgaaaactgttgagccggactgtcgataaccgtcggcagcagttttttctgccccaaaggactgatcccaccgacgagataaccggttacacgctgagccagctggggatcggccatgtcggcctttttggcacccaacgctttggcaaccttcttgagatcgagctgggccgcgactggcgtaacggcaacggccaggtttttagcctcaccgtttaaggccaccagcagcgttttgtaaacctgggcggcatctagccccaatttctttaccgcttcatcgccaaaattggtttcatcgctgctgtgctcgtaggcatgcagcgtgaagctgattttatttttttccaaaagttttacggcgggtgtcatttctcttttccatttaacaaagtcggcttttcacaggcggcgacttgattacgtaaaaaaataatcactttgctcaatcttttgatactaaagactaaagtacgaaaatcaatcgttctgtgcggtttttgatcattttgagtgttgccagatgtcaaacacgttgctaacctacgcgcgccggcatggattcctcaagaatgccatgttgccgcgataattaataaaaatgaaattcctctttgactggccaatagaaatattggccatttttttatcccgagttttatcccgcaacaaattccatttttaattcttctgattcagcaggttgggaaggttaccttcgccataaagatgcagcgcgccgacggcgacgacgtagtttcctgcgggcatattttccagcagtcgcttccagcgctgattacgttgatgcataagcacatcgtaaagcacgttaccaaaggtggcggggagctgctcgatgccaacggacggacggctgtccagccaccagctgatcatggtttgcaagagtctggcattagtgtgccagtgggtaagagtgtcatcaagcaggctacgcccgccttcaggtaattgatgtagcaattcgagctgctgctctgccccttccagctcaatgactctctttgcatgagtttttgcataggtcagcagctgaaagtcgatgccgtactctccgcgtagccctaaacgctgcgcctgtgttgcctgtaacattaacgctatctgccagcacggcagggcaatgagagaatacattggcacgcccagctcatcgcacagccgctcgatatgttgatactgctgctcgtcgatgcgttccaccagcggtggcagcggggcgggttcgccgaacggcgattcattgccgctgatgtcggcttcgacaatcagcgcatcggcctgcgccacctttcgaatcagttgtttcggcagcggagacatgtcttgtgtccccatgtggatactgcccaccagatgaaagttgcgcccacccggcagcgtaatatcgatagcaggatatgggtattgcgtgggagaaagcagcccggtccagcgagccaggcgaattacaagttcccgtatcattcatagtctccctattccaattgcttttcatgctatcgcctgcgcgcaattaggaacagggggaaaactctctatcgcacatttacttaatagatggggtgttatcgggtctgaaatgcagcagtcggttggcgttggctacgacagtaatcgatgacagcgccatcgctgcaccggcaacaatcgggctgagcagcgtgccgtcagcgggaacagcaccccggcggcaatcggaataccaatcacgttgtaaacaaatgccccatcaggttctgcttcatgttgcgcagcgtgcctttggacaacgccagcgcatcggcaacgccgtgcaggctagggcgcatcagcgtaatagcggcggtttcaatcgccacgtcgctgccgccgcccatggcaatccccacgtctgcctgtgccagggccggtgcatcgttgataccgtcaccaaccatcgccacctgctcaccgcgggcctgaagcgtcttgatggcttcggccttgccctcgggcctgacgcctgcaataacgtcatcgattccagcgagtctcgcaatggcgttggcggtaacaggattatcgccggtcagcatcaccagcttataccccgcacgatgcaggcgacgcagcgcatcgatgctgtcttcgcgtagggaatcgcgtatcgagaacaacgccacaaccttgccgttggcggccagcagcactggcgtaaaaccttcggcagcctgtttcgccagcagcgcatcggcttcatggcaatctacctgatgttgttcgagcagttcccggttaccgagcagcagggcggtagcgccaagattcccactgaccccgagcccgccgtgagttcggaaatcggtaaccggtgaaagagccataccggccgctttctcggcaattgcttgggcgagcgggtgatgagacccctgctcaagcgaagcggctagcctcagcgcctgctgctgctcgttagcattaaacagatgaacgtcgataacctgaggtttaccttcggtaagcgtgccggttttatcgaacaccagcgtggtcagcgaactggccttttgtagcgcatcagcgtcttttaccagcacaccaaactcggcggcgcggcctacgcccgcagtaatcgacatcggtgttgccagccccagagcacaaggacaggcgatgataaggaccgttgttacgataaccagcgtatacatcagctgcggctgcgggccgaagaagaaccagactgcgccactgagcagcgcaatgagcaccactgtcggaacaaagactgccgaaattcggtccgccagtttgccgatttgcggcttactgctctgggcctcgcgcaccaggttgataattcgcgacagctgagtttgtccacctacggcacgagcaataaactgcacgctgccgtctcgcacctgggtacccgcgctgattttctcaccgggagtgcggtgctgcgcaataggttcgccggtcagcattgcctcgtcaaaccaggcttcaccctgatgaatctcaccgtcaaccggcacacgatcgcccgtagtcaggcgtaacagcatcccctgctgtacgtctgccagcggcagcgttttttcacccttgtcggtcattacccgtgcggttggtggcgtgaggtcgagcaggcgctcaagcgcctttgacgaacgctgacggccgcgctgctccagcgcatgacccagattgatcaggccgattatcatgactgctgcctcgtaatagaggtggcgcgcctgcatggggaaagagtctggccatagagtgaccagaaacgagaaaatccaggctgccgcggtgcctaacgagaccagcgtgtccatattggcgctgccgcgcaggaggcttttccaggcactgcgataaaaatggccgcctgcgatgatcataatcgccagtgtgagcagcccgacgaccagccaaccgctacgattctcgtcggtgaccatcatctcgccgccaaacagccccaggccattaacggaataccggccgccagtcccagcgctgcctgccagctaaaacgaatcatactgctgcgtgcagtttgctgctgccgctcgcgacgcagcgtttcatcgataataatttcagcgccgtatccggccttttcaaccgcatctatcagcgcctgggtgtttttcgcaccccgaaccagcgcgctgcgctcggccagattcacattggcgcgggtgacgccatcaacgcgctcgagggcttgttgcactttcgatacgcagctggcacagctcattccgctaagcagaagttgaacgctgtcgtcgtctgccgcgggagtcgtttcgttggatgccggaacagaaagggttgccgctgactgacgttccggcaaagacattttaggcagagtcagcggctcagattttggggacgcgtcatccgcctgaagcttggcgtgataacccgcgttctcgacggcgtcgatcaggctctggctgcttgcctcgccggtaatcacggccttgtcgattgtcacatcaacctgctgtgccccgcaacggcttccagcgctttgcgcgtagatgccacacagtgaccgcaggataagccctcaagggccaatacggtggtgttagccataattatttcctctgggcgatttgtgccctgtttaaggtgaataagtcgtcaattcctcgtcatgatatacaataaaccttccagcaaggtgaaggtcaaggaggcgaaatgaatattagcgacgtagcaaaaaaaaccggtttaaccagtaaagcaattcgcttttatgaggaaaagggcctggtcacggcacccatgcgcagcgaaaacggctaccgcagttatgcgcccaaacagattgaagaactgacgctgttgcgacaggcacgtcaggtgggatttaccctggaggagtgccaggagttggtcgcgctgttcaataatccgcagcgccacagtgccgatgtaaaagcgcgaacgctagaaaaagcgcaggaaattgggcgacacatcgaggaattaaaagaaatgcgccagcggctgctggcgcttgcggagtcttgtccgggtgacgacggcgcattctgcccaatcattgagaatctgagcggctgctgccacaaataggttattccgcgagtacggtattaatggctgggcatgacgcgtaaggtgttcccttcaacgcctgtcacggtgacctcttcaccgatattcaggctgtccgcacagctgacccgccaggtgctgtcgccgatgcgaatgcggctgtagccattctccggttgctcgagcaaatggccgtgtagaccgaccatctgctgaccgcgttggttaagactggcgtttgattcgctaaccgtggttttgcgtttaagccatgcggcccaaagcagggcggcaatgacggtgagcacggcgaaggccacgccttgccattcccacggcagcggcaccagccagataagcacgccgactagtgcggctgacacgccgctccacagcagataaccgctggcaccgagcatttcggcggccagaagcaggcccccgagcgataaccagaacagatgtggacttgccatcaactgctgcagcattattttccgcctttggtttctttcagcaattccgcgataccgccaatcgagcccatcaggctggtggcatccagcggcatcataatcactttgctattgttagccgacccgattttggtcagtgcttcagtgtatttctgtgccacaaaatagttaatggcctggacatcaccggccgcgattgccgctgacaccatctgcgttgccttggcttctgcctcggcgctacgctcacgcgcttcagcctgtaaaaatgccgactggcgttcaccctctgccttgaggatctgcgactgcttttcgccttctgcgcggaggatcgctgactgacggatcccttcggcttcaagaatatcggcacgttttgttcgttcagccttcatctgcgcattcatcgcggaaaccagttcggccggtggtcgaacgtcacgaatttcgatacgggtgattttcacaccccagggattggtggcctcatcgacaatatgcagcaggcgagcgttgatgttgtcgcgctgcgacaggatttcgtcgagctccatcgagcccagcacggttcgaaagttggtcatggtgagattaactatcgcctgctcaaggttgctgacctcatacgcggcgcgggcaggatcgatgacctgaataaagcacacggcgtcaatagcgacgttggcgttgtcgcgcgagattatctcctgtgaagggatatccagtacttgctccatcatgttgattttacgaccaatacggtccatgaagggcacgaccagcgtcaggcctggcatcagggttttggtgtagcgaccaaagcgttcaaccgtccattgaaaaccctgaggcacaattttgacccctgcaaataccacgatcagcgcaaaaatgaccacaacgggtataaaagtcagcatggtgaaactcctgtaatgagatatcccgaaatgtcgggtaaaccgtttccctgtgccagcgggcaaactgccgctgcgggtaaatcatcgcatatttagacaaagcggtaatgattaaaggatagttcagagaggaggcgtatgacgggagacgtatcccagaaactgcacgctgtagtcgagagagggaaacacagcgtgcagtaaggcattatcaggagtagacaggtgggactagtaaagcagtgagtaaagctggcgacgatattttgcggctaatgcatcaccggtgccgagggcggccaaaatatccatcagcgttttacgcgccgcgccattaccggcagccaggtctttcttcagatggccaagcaacagctcgagcgcctcttcattgcggccaacctgatgcaactgcaacgcaagctgaacggccaaatcgacgttctgcggatctttctcgatctgctgctgaagttgctggatctctggggtgtcagcggcctgtttcagcaggtcaatctgcgcgactagcccctgataacgggtatcgcggtcctgcagtggaatggtcgccagcaccgcttctgcgtcttcactgcggttaagcagaatctgggcctcggccagtgaaaggccaatgtcgctccgctgattgctgagttgccaggcgtctttcaacagaggcagggcgtcgatcaccttaccttgctgcatgagctcgatagcctgtgcggttttgatctcttcttctttaggcagaactttgctcaatagctcgcgaatgacttcttcaggctgtgggccctggaaaccatcgaccggctgaccatcctggaagaggtagacggcaggaattgaacgcagaccgaactgtccggcgatagcctgctgcgcgtcgcagtctaccttggcgagaatgaactgacccgcgtactctgcggccagtttttcaaggatagggccgaggattaggcaatgctggctgcgttcagaccagaaataaaacatcactggcacagtcattgactgctccagcgtttggtgaagattggattcggtaatatctattgataaaggttgtgcaagcatgaattcttttctctctcgtccgttccgtttagtacctaaatgggggcgatttagggttgttcaagacggggtatcaactatttccctgagcagcctgtccagcaaacgggcgggtaacaggcggcgcgccactacaaccgcgtgagtaatcaaggtaaccggatagcgtaatttcggccgtggactctctaaagcatggcgtaattttggcaacactgcctctgcacccagcgtaaatttgtcagccagactcggattaataatcggcttgtccgactgtgtctgtttaacgttcagtgtaaagttgctgtgcagtggacccggctcaatcaggctgacatgaatgcccgtgccgtgcagctccattcggagcgtatctgaccaggcctcgagcgcatatttgctggccgcatacaccccgcggttcggcgtcgtgaccagacccagcaccgagctggtttgaataatacggccctctgcgtgtgccaacatcgccggaagcagcagctgggttagctggtgggtcccgaaaacattggtcgaaaactgctgttcaaactgttcgcggctcgcggtgtgcagtgagccataaacgccgtatccggcattgttgaacagcgcatatagacgatttccggtgagttcaatcacctcggcagccgcgcgtgcgacgctgtgcttgtcgtcgaggtccagttcgatagtttcaaaacctagctggcgcaggttgtcgatatcctgcgctttacggcatgccgcgagtacgcgatatccgcgattgcggagatactgagcggcagcaaggccaattccactcgaacaaccggtaatcagaaccgctttttgcataactttacctgttaaacgccccaaatatttggagattatggtttactcattgatggagcaaccaaaggtgccagcttgccggacatccagtcggcaataaagctttgcgccgcctgattcgggtgaagcccgtcgtcctgcatccattctggtttgatagcgacctgttccataaagaaaggaaccagcgggatatcagcctgtttggccagtgccggataaatcgcataaaacgcatcgttgtagcgtttaccgtagtttggcggcagacgaatctgcattaacagcggctcggcatgggcctgcttcaccaaagtcactatctggccgagcgtttggctgatggtctgcggcgcaaaaccgcgcagcccgtcgttagcgcccagctcaatcaacacccagcgcgggtgatgctgttgcagcagtccaggcaggcgagccagaccttgcgcagacgtatcaccgctgatgcttgcgttgacaatatcaggcaggccaccacgctttttccactgattattcagtagcgtgggccatgaagtgtttgccggtaatcggtaaacggcactcaaactgtcgcctacgatcagcagcgtatcagcagcaacggcgcgaaaacttaacattcccatcaacagaaggaagggaagatgccagcggaaaacgtacttgaagttcatcatcttagtaaacacgttggtcagggtgaacatgagttatccatcctgtccggtgttgagctggttgtcaaacccgctcagactattgcgctgatcggcgagtcgggttcaggaaaatcaacgttactcggtattcttgccggtttggatgatggcagcagcggtgaagtcacgctgctgggaaaacccttatcagcgctaaatgaagaaaggcgtgcggcgctgcgtgccaaaaatgtcggttttgtcttccagtcgttcatgctggtaccgaccctgaacgccctcgaaaatgtgcagcttccggcgttgctgcgtggagaaaccgacgccagcagccgcgaacaagcggtgcaattgttgaaacagctgggccttggcgagcgtttacatcatctgccggcgcagctttccggcggtgagcagcagcgcgttgcgctggcgcgcgcctttatcggcaagcctaaactgcttttcgccgatgaaccgaccggaaatcttgaccgtcataccggcgaacgcatcgccgacctgctgttctcgtttaaccgtgataatcacaccacgctgattttggttacccatgatgagcaacttgccgcgcgctgtcagaggcgcctgcgactgcgtgacggaaaattgtgggaggatgcatgatttggcgttggttttggcgtgaatggcgatcgccctcgctgttgattgtctggctctcattaacgctggccgtggcctgcgtattggcacttggcagcatcagtgaccgtatggacaaagggctgagtgagcaaagccgcgactttattgccggtgaccgtgtgttggagtccgccaggccgattaccgaagcctggatccaggacgcgcagcagcaggggctgaaggtcagccgccagctgtcgttcatgaccatgacctttgccggtaatacgccgcagctggcgtcggtcaaggcgaccgatctggcgtatccgctgtacggcaatctcgacacccagcctccgggcgtcaagccgcagccgggcactgtgctggttgcgcctcgactgctggcgttgctgaatctgaaggtcggagacaacctcgacgttggcgataccacgctgcgtattgcggcggtgattaatcaggagcctgactccgggtttaacccgttccagaccgcgccgagagttatcatgaatttgcaggacgtacctaaaaccggtgcgattcagcctggcagccgtttgacctaccgttatatgtttgccggttcggcgcagaatattgcaacctacggcgaagcggtgaaggggctattgcgcccggaccagcgctggtatggcatggaagagtctgacggggcgttgagccgttctctgcaacgttcgcagcaattcctcaccctgtcagcgctgctgacgctaatgctgtcgattgccgcggttgcggtctcgatgaaccattactgccgcagtcgttacgatttggtggcggtgctgaaaacgcttggagcagggcgacgtgcgctgcaaaaattgattattgggcaatgggtcgccgttttagtgttggcggcgatagcgggcagtattatcgggctgggctttgaggccctgttaatgaaaatgctggcgccggtgttaccctcaaaattaccccctgcgggtctctggccgtgggtgtggtcgatggggcattggtcattatttcgctgctggtgggcctgcggccttaccgccagctgtcggcgacgctgccgctgcgtgtgttgaggcaggacgtcgtcgccaatgtctggccgctgcgctatttcctgccggtgattattttggtggtggttggactgctggtcgcgctggttggcaacagttctctgctttgggcgctgttgggcggtattgtggtgctctcactgctgctggggggattggctggctcagcctgcttgtccttcgccgcctgaccgttagccatcttggcctgcggttggctatcaataggctgttgcgccaaccctgggtaacgctgagtcagctggccgcgttttcgatgtcattcatgctgctgtcgctcctgctggtactgcgaggtgacctgctcagccaatggcagcagcagctgccgcctgatagtcctaactatttcctgctaaatatcaccagggagcaggtgccgcaggtgactgacttcctgcgccagcacaaggttgagccggatacgttctaccctatcgtgcgggtcaggctcaccaaaattaaccagcaggatgcgactgaccttgtccacccggggatgcagggcgtgaggcgctggaccgtgaattaaaccttacctggatgcagggactgccgtcgcataatcaggtgatttccggcgagggcccgccgaaagcgggtgaggtgtctatcgatcagggcatcgccgagcgtctgaacatcaagctgggcgataccgtgacctttagcggcgatacgcaggatttcagtgccaaagttaccagtctgcgtaaggtcgattgggacagcctgcggcctaatttctactttatcttcccgccgggcgcgctcgatgcgcagccgcaaagctggctaaccagtttccattatcaggaaaacggacagctgctggtggagctaaacagacagttcccgacgctaagcctgctggatatcggctcaatcctgcgccagattggtgatgtgcttcagcaggttagccgcgcgcttgaggtgatggttatcctggtcatcctctgtggcgggctgctgttgctggcgcagattcaggtcggtatgcgtcagcgccgtcaggagctggtggtttaccgtacgctgggagccagcaaaaaactgctgcgcagtacgctgtggtgtgagttcgcggtgctgggattagtcgcggggatcgccgccgcagtgggcgccgaggctgcgctttggctgctgcagcgtaaagtcttcgacttcccgtggcagccaaatatggtcctgtggtggtcggtgcctctcctgagtgcggtgctgctatcgctgtgcggcggctggctggggattagactcttacgcggcaaagccttgttccgcagttatcagggctgattgtcataccttgacgaaaactaccggcgtggttttccacgccggtaaacgcctctagatattttttgctatcacgtcgtgcactatctcgcgcgtccattcgtagttatagtggttatcgtcgaagaacatcggaacggtattatccttcacaaagacgcactgcttgccttggcagccatagttataaagatcaaagaacttgatatggtcaatggatgagagcgttctcatgtcgttataggtttcctcggtatcacgctctctcagactattgatatccgccgttttgccatgaatttgcaataagcgatagacggtgggtttaaagtgtttggtttgggtgatgaaataaacgtttggcgtgaacttctgtagataaagctgggtcttctcaatgcctttattgatgtcgttataggtgtggaagttataccagtcgcttgccacgataattgcgtctatttttctcgatgggatgagtttattgaacgcgtaattcatcagattgacgcagggtgctgaacccacggaatcgataatcgccggacagcctgcggcagtgacctgaagaacggtatcgttcttatattcctgcttcaatgctgctgaaaattcagcggcgtgactgtcgccgagcaacaaaatggttttgcctttttggttatctggaacgcaggccttatagttgaaatccaaattgctaccctcaataaagcacagtgccggcaactgcccaaactgcgttttacctgcgtcagtagtgatgtagttactgtatttatccagtgagaccacgtctttgctcaaccattggctggaaactgatgccgatgaaagcccaaagaacagcgccacaatacagatggccgccgtcggggttttgagccatgagaatctaaccttctgttcgactaattcataagacaggtatccgaggaatatggacgctgcgatgccaataagctgattcgccaatgagaaagcaatgttattggtataaaaaagcgaaacaataggccaatgaaccagataaatagaataagaccatttaccaatcttttggatgtaatgattttttagcagtacttgctcatttttgacgccagcatgcagaataagggcagtggcgatagcagggataagcgtcggatagctgggccagaaggctgtttctttataggttaaaacgaagccgacaattaagaccagacagacgatttccgtggtctttttatatttattttcccactttatgctggatgccattgcgccgagaaaaagctcccaggctcgggtaggcaggagatagaagtttgcctgagggtggctttttgctatcagaatgcataacaccaatgacgctgcggtgatcaacgcataggcaagcaccttcttgactctcagcttctgaacaataaataaaaatattggcaggcagagataaaactggaattctacacccagcgaccaggtatgcagcaggaagtaaaagtcagcggcattggagaaatagcccgacgcggttttcagataaaaaatattagaggtaaatgtcagtgcagggacgatctctttaaaagaatccttgaagctgttgggagggctgattatcaagagaataattgcataaagtgtgacggctgccagcagcgcgggatatatccttttgaatcttttcttataaaatccgatagatgaagacagtgtgacgggttgtctggagattatctcgttcatgagatagcctgagattacaaagaaaacgtcgacccccgcatagccgcccggcagaaaattaatttgaaagtggaacagaacaactgatgccaccgcgataaatcgcagggcatttatgtctaatctaaacatcagcattttcctgttatttaatttttatttaaaaatcaaaccacttcccgggttacaagaaaaaacgtcaaaatagaaattgctttgcgatttcagatgcctctttgtgcgcctgaattattcggaaaagtctcaaccctctttatcccaaaaataagagtagtaaaagtttaggattaagacgtgatttttttgagagtgtgctaattatcgttggggataagcggaggggagataaaaataatgctaattttcaaagagaaaagggcagcttgcgttagctcactgcccctagaggagtcgcgacttccaattttattgttcagctaaactaaagcttctcaagcgcccaggcgatgccgctggcatattcggcgggcagcatgggaaccagcgcctgcaaattatccttcagcaacaggggattggcgtcgttgaggttgaggtgcccaaccttgcgaccggctctgacttctttctcgtaccagtgcagattcaccagcggctggctcagccactcgttgtttacatcggtgccaatcaggttaaccatcaccgacggcgtactgacaaccggggttggcagcggcaggtcgaggatagcgcgcagatgtagctcaaactggctgatagacgcgccattttgcgtccagtggccgctgttgtgcacgcgaggcgccagttcgttaatcaacagaccttctgcaaccacgaagcactccatcgccatgacgccgacgtagccaagctcgttcataatcgcggcaagcatggactcagcctgttgctgctgggcagcgttcggtgtcggcaatgcgacgctagtgcgcaaaatgccgtcctgatgcaggttgtgagtcagcgggtaaaacaccgtcttgccgtcatggctgcgagcaccaaccagcgagacttcacccgaaaaattgatgccttgctcaacgatgcactcgccgtagcagtcctctggcagagcggtttcttcgccctggcggaagcgccattggccacgaccgtcgtaaccgccaacgcggcgcttaacgatagccaactcgcctatgttcgcgtagatgctgttccactctgaggcgtcagccagcagttgccacggggccgttgccagacccagctggtcgagcagctgtttttgcgtcaggcggtcggccagacgcgggaaaatgtcgcggtttacaaagccggtatggctcgccagttcgcgagtcagcgcggtttctggccagcgttcaacttcggcagtgatcacgctattctggaaaggaacggcttcaggctctgcgtcaatcccaaccggataaacggcgatgcccagcggctcacctgcctgacgcagcatgcggcctaactggccgtttccgagtacgcagaccggcttcatgcttcctcccgcggatcgggattgttcagcacttcgtcggtttgctctttacgccaggcggcgagagcctctgcgatgcgcgtgtcgtgtagcgccagaatctgagccgccagcagggctgcgttagccgcacccgctttaccaatcgccagcgtaccgaccgggataccgcgtggcatctgcacgatggagtaaaggctgtcaacgccgctcagtgccgcgctctgtaccggcaccccgaggacaggaaccagcgtttttgcagcaatcatgcccggaaggtgtgcagcgccaccggcaccggcgatgattacatccagacctttttcagacgcctgctcggcaaagctgaacagtttgtccggcgtgcggtgagcggagacaatctcgacatgaaaaggaatattcagcgttgtgaggacgtcagcagcgaactgcatggtagcccagtcacttttagaccccatgacgatagcgatttttgccgggtaacgttggatgtcatgcctgtaaagctcctgtgattatgcaagcgttgtcaggtagcggcgtaaacatgaatgattacctgaccgagagggcgcaaataatagcacggcaaatccgcaaggaaaacggttgcgtagccagcattgctgcaactgcgatgactttgcgcatataatcaagggataacaaatttcacagactttacctggaattatcgccatgactgaagatttactggctccgatcaatgactttctgcactgcgaaaccccggcacgttgggtagacgttgccttggttaatcaggaaattatgctgatcgaccacgccaactgcgaaaagaaagccgccgcctcggcgatgagtttgatgacccgctatcttgaccgcaccgaactgctgttttgcgcagcacgtctcgcgcgcgaagaactgcaccatttcgagcaggtggtggatattatgcaaaagcgcggcataaattatgaggttcttacgccatctcgctacgccaatggcttgctcaaacattcacgccatcacgatgagctgaatcttctggtcgacagactgattattggtgcatacatcgaagcgcgctcgtgcgagcgttttgccaagattgccccgcatcttgatgaaacgctgtcgcgattctacacctcactgttgcgttccgaagcgcgtcatttccaggattatctgtcactggcgcagcagtatgctggagtggacatcagcgatcgcgtcgaggagttaggcagggtagaggcggaactgattctgtcaccagaccaacagttccgttttcacagcggagtaccggcttaatctttaccggttaaaatgggaaggtgacgagttctacgccttcgggcgtgaccttcaccattgaaccttcttcgtgccatgccccgagcacggcacgatgacccagggttttgcccagctcgaccggatgaatggcgggccgatgcgtgtggccatggatcatccattcaacgccgtgggcctgcatttgctgcacgacggcctgagggttgacgtccatgatgctcatgtctttatggccgttcgacgccttgctccccgcccgcattttggcggcaatcgccaaacgccatttgagcggaagcattaagaatattttttgaatcagtgggttatgcacttttttgcgaaacttttgatagcccacgtcatcagtacacagcgtatcaccgtgcaggataagcactctgcggccgtaaagttccagcaccttctcttcaggcagcagcgtcatcaggctgtcgcgggcaaaacgtcggcccagcaaaaaatcccgattgccgtgaatgaaaaagcagggtacgccctgttgatgtaattgattgagtgcacgagagatttctgcgtgtaaaggctggggatcgtcgtcgccaatccaggcttcaaacaaatcgcccagaatatagagcgcctcggcctgcggggcatcctcccgcaaaaaacgcagaaaaccggcagtgattgccggttcctgtgcgcaaagatggatatctgcgataaaaaacgttgtcattcctgcgtgcgttattcgctaacggtaacgcttttgatgatcacgtcttctactggaacgtcctggtgcataccgctgcgaccggttttaactgctttgattttttctacaacatccagaccgtcggtcacttctgcgaatacgcaatagccccaaccctgtgcgttctggccgctgaagttcaggaaatcgttatcaacaacgttgataaagaactgagcagttgcagaatgtggatcgttagtgcgcgccattgccagcgtaccacgggtgtttttcagaccgttgttcgcttcgtttttgataggtgcgtcggtgtttttctgattcatgcctggctcgaaaccgccgccctggatcatgaagccgttaatgacacggtggaaaattgtgttgtcgtagaaccctttacggcaatagttcaggaagttttcaacggtgactggcgctttgtcagcaaaggtgttgataacgatgtcgccgtgattggtgtgaaaagtgaccataataatcatcctgcttttgttagtgtttactcataatgaggcagtactatagccttttcttataccataactcaaaagtagccgtcagcttcttgctcgctggccgctaatataaggtgcggcaaagcgcctggatgctgtttaatttgttatgttataacaatagaatgcgtcaatatgttgatgagcggcttataccgtttcggtagcgggcttttcgttatattatgagcattattatcacacgcacgttttttgcattttaagtaatttacccacaacacaattggaatagctcgatgctgaagatttttaacaccctgagtcgccaaaaagaggaatttaaaccaattcatgccggaaaagtcggtatgtacgtgtgtgggattaccgtttacgacctctgtcacattgggcatggccgtacttttgtctctttcgacgtcgtggctcgctacctgcgttattccggttatgcgcttaaatatgtgcgtaatatcaccgacatcgacgacaaaatcattagacgtgctgctgaaaatggcgaaggttttaacgatcttaccgatcgcatgattgctgaaatgcatgctgatttcgaggcgttagggatccttcctcccgatctcgaaccgcgcgcgacgcatcacattgccgagatcgttgaactggttcagcgcctgatcgaccgcgatcatgcctacgttgccgtcaatggtgacgtgatgttctccgttgaaagcgatgctgattacggcatcctgtcgcgtcaggatcttgaccagttgcaggctggagctcgcgtcgaagtcgccgatgtcaagcgtaacccgatggacttcgtgctgtggaaaatgtccaaagagggcgaaccgagctggaattcaccgtggggcaacggccgtccgggctggcatatcgaatgttcggcgatgaactgcaaacagctgggcacccattttgatattcacggcggcggttccgacctgatgttcccgcaccacgaaaacgaaattgcccagtcttgctgtgcgcacgatggtccttacgtcaatacctggatgcactcgggtatggtgatgattgaccgcgaaaagatgtccaaatcattggataacttctttaccgtgcgtgacgttctcaagtattacgacgccgaaagcgtgcgttacttcctgatgtctggccattaccgcagccagctgaactacagcgaagagaacctcaagcttgcgcgttcatcaatggaacgcctttacaccgcactgcgcggtacagatgccaatgcgcaacctgcgggtggggaagagtttgaggctcgtttccgttcggcaatggacgacgatttcaatactccagaggcttattcagtgctgtttgatatggctcgcgatatcaaccgcttgaagagtgagaacccagaagctgctaatggccttgctgccgagctgcgtcgtttggccggggtactgggtttactggcgcaggatcccgagcagttcctacagtctggcgctcaggcagacgatggtgaagtggccgagattgaagccttgatcaagcagcgcaacgatgcgcgtgcaaccaaaaactggccgatggccgaccaggcgcgcgatcgtttaaatgaaatgggtattgttttggaagatggtgcctctggtacaacctggcgtcgcaaataaatcatagcttttcagctactctgcgccccagtcacttagttcgctaagctactggggagttatgagctcaccgacctgatgtgacgcgaaatctccagatttatcattccgataaactaataaaaaacggcggttaattgcttaaccgccgttttttttatcgcaataggtctgcctgattactgggaggctttaacgaccatcttgctgctggcgaattcaatctgctgatcggccagaattttgcaacgtttacgggtttcaacctgaccgttgaccttaaccagaccttcggcaatcaccgcttttgctgctgcaccgctctcacaccagcccataaatttgagcaggtcgcagagttctacgtgcgggtgagattcgagataaaaagtttccatgccatcctgtcttagtgattattcacgtcgtggtattcctcgcaagcctgcaaggtattttggataagtgtagcaacggtcataggaccaacgccaccaggaaccggcgtaatgtacgaagctcgctcggacgccgattcaaattccacatcgccgactactttaccactttccagacggttaatacccacatcaatgacgatagcacccggtttgatccattctcccggaataaagcccggtttaccgaccgcaacgaccactaaatcggcatgctcaacgtgatggcgcaggtttttggtgaaacggtgagtcactgtggtggtgcagccagccagcagcagctccatgctcatcgggcgaccgacgatgtttgacgccccgataaccacggcgttcaggccgaaagtgtcgatattgtaacgctcaagcagcgtcacgatgccgcgtggggtacaagggcgcagcttaggcgcgcgctggcacaaacggccgacgttgtaaggatggaagccgtcgacgtctttgtccggatggatgttttccagcaccttgacgttgtcgatgcccgcaggcagaggcagctgaaccagaatgccatcgattgcgtcgtcgttgttaagctggtcaatcagcgccagcaactcaccttcggtggtggtagcaggcaaatcgtatgaacgggaaaggaaaccaacctcatcgcaagctttgcgtttgctggcaacataaatttgtgatgccgggttctgaccgaccagcacaacggccagtcctggggcgcgtttaccctgggccaggcgttgtttaactttttcagcgacttcgcttctaacctgctgcgcaatcgttttaccgtcaataatctttgctgccatctgggaataaatccatcaattaattaagtgcggggaatgcgcctattttgtcagaacgcgcggctgctgtcaggcgcagaatcatcataagatgaacgtaaattaatcgaatagccgatttttgtagcaataaagtgcaaaaaggcgtgacagaatcgagagttatgcgttttataacagatacaaacggtgacgcctctgcgcgtaaaaatgcacttttatcgattttaagagggagaaggcggcaatgaccagaaaagtaggcattataggcgtgggtcacgttggggccgatacggcattttcacttgtgacgcaggggctgtgtgacgttctggtcctgatcgatgaaaatgaagcgaaggctgacagtcaggcacttgagctgcgtgatatggcttcgctgacggcttcgcgggtgcaggtgatcgccaatgattatgcggcgctggaggatgccgaggttgttgtcatcgccgtcgggcctaaaacgctgctgcgcgaagaccgtctcgaagagctggccgaaacacgagaggcagtgagtgaggtaacaccaaaaatcatcgccagcggatttaatggcgttatcatcaatattaccaatccctgcgacgtgattactcaggtaattcagaaagtgagtagactgccgcatgcgcaggtattgggtaccggcacctctctggatacagcacgtatgaagcgcgtggtcggtgagttctttagcgtcgatccgaaaagcgtaaacggctacgtgatgggcgagcacggcgaatcgcagtttgtggcctggagcacggtaaacatcggcggctgcccggttagcgaactggcggtagagggggaagcaaactggctacagcttgagtcggcggtgcgcggcggcggatgggcgattctgcagggcaaaggttggaccagcttcggcatcgccaccgcgacggcaagactggttgatgccgttctctccgatgcgcaaagcgtgtatccggtcgccgcgtgggacgatgccaaacaggtctacatcggccaaccggccattgttggcaaaggtggcattgttaaacgcctacatccaaagctcacaacagcagagaatgcggcctacgagtcctccgcacgagtcattttagatgcctttaaccgctaaagtcgtaagccaatgcggcaaatcgtaaaaaacggcggcagcggcctaatcattgaaatttatttaatttcaccagccttgctgccgtattagttagaaatttaggtgaaattgctcaggcattgagcagtaaacgcaaaagccattgactcaactcggatggcccgtataatccgagtccgctgtactgccttttagcagtctaatgcgcccttagctcagttggatagagcaacggccttctaagccgtaggtcacaggttcgagccctgtagggcgtaccattaatatggcagcgccagaattcagacatctcaggatgtctttttttatgcctgaaattcactgctgaaccctttgcagcaaagcattacattccctccagaaactcaataaacgcccgtactttggcattgagcgccgaacgttccgtcacgcaggcatagatattcatcggtaaaggttccgctcgggcggtgtcgtcgttaaaagtagtaaataacgctaccagctttcccgcatcaatcaacggttgtgcgacgaagcctgcaagtcgggcaatgccgccgccgtttagtgcaatttgcgtaatgatatcgatgtcatcactgataaaaccggggttcagtttggcgttgaaacgtttgccgtcacgcacaaaactccagggcaggaaacggccatcggtgggataacgaaaaaccaggcaggaatgatggctcaggttctcaggcgttgcaggtacgcctgcgcggtcaagataggcaggggcggcgcaaaacacaaaagggattgaggcaatagggcgggcgataagctgatcgttgagctgggcctcgatccgaatgctgacatctacgccttctagccgatgatcgacgctgcgatcggtgctgatgatctctatttcgatatctggataagcatctttaaacgcaggcatgcgcggtgcgagcacgtgacggccaaaggcggcggtcgttgcgatacacagcgccccctgaggtttgatctcgacggcagcggcctgcgaggcaaggtcgatatcctgcgggatgtggtgcactttctcgtaataacgtttgccgctttcggtgagcgtcatgctacgcgtagtacgcgacagcagccgcacccctaaatgattttcgagccgcgagatgctctggcttacagcggcagggcttatgccctgggcacgagccgctgctgcgatgctgccgttatccaccacgcggataaagctattgatcaggcccagaatatccattgatgctcaacgctccattcgtaatttttacttagcaatgattaaagcatagcgcctctaccgccgtaccggagagcttgttaggttaagcgctcttacgctacttatcaaaaaagcaggagacaacgatgacccagagcaccctgaagaatacggcaaggatccgctttcccaagcatacctcaccctacgtttttgcgctttatatggcgaccatcatggcgtttatgatgagtctggtgatcacgttcgctgaatttggcgcaggggatcattacatggcaaatgtgatgaatgcatatcgcgttgcaatgcctgcggccttcgtttgcattcttgtggttcggcctgtggtaatgcgtctggtgagctggacggtgcacggtcattgagtctgtttctgtaggagtttgtaacctttgcgtgctcattatttcggtgctgaacaactctagtgactacactaagttgtaatacccaatagaaatcaatgaggagcatgcatgaatttatctcttactcatcaaattgcgctggtcaccggtgccagctcgggccttggctatgcctgtgccgaagggctggcagccgccggtgccagcgttgttgtcaattacaacagtcatgcagaacccgccgaagccttggccgcacagattcgtcaacagggcggtcaggctatcgcgttaggggagatgtctcgaacgaagaggacgttgagcgtctgtttgaacagacgatcgccgaattcggggcgttggatattttggtcgccaactcgggcttgcagaaggattcgccgattggtgagatgacgctggcggactggaacaaggtgatcgaggtgaatctcaccgggcaatttctctgtgcccgcgcggcattacgtcagttccgcaaacaggggacacagcgcaatgtgagccgcgccatcgggaaaattatccacatgagttcggtgcatcaggttattccctggggtgggcacgttaattacgcgtcttcgaaaggggagtggatatgttgatgcgcagcatcgcgcaggagattggtggcgagaagatccgcgtgaattctgtggctcctggggccatcgctacccccatcaatgcaagcagcagagagggagaaggtaccaacaaaatcctcaaactggtgccctatgggcggatcggtgaccctgtcgacgttgctaacgccgtggtctggctggctagcgacctctccgactacgtgcatggcaccacgctgttcgttgacggtggaatgagcctctatcccggttttcaggataacggctaatcagctttcatcggtgcaaccaccacattgacgtttttatccttcatgcgctgaatgatgggcagcggcgtgccttgattgacgatgaccacgtcaaactcgtcgaggtgggcgaagctatgcagggcgcggcgttcaaacttggtgtgatcgaccagcagaatacgtttctcggaggactcaaacattgcgcgcttggtttcgaccatctcggccgactggtgaaatacccgatcgtcgataatcgccgacatgctgacgaagaacatatccgcctgtaaattcgcgatttccttgcgcgtcatctggcccataaaggcgttgcaccagttatagaactggccgccgaggcccattaaggtgatgtcgcgcatttctttgagctcggtcatcacggtgagtgagttagtaatcaccgtcagcggcgcttttgacggcaaatagcgcgccatttgcagcacggtagtggagtcatcgaaaaatattgcctgaccgggttcgatatagctggccgcaacctcggcaagggcacatttttcttcaagctgacgggtggaacgataaacgtcgctggactcgaccaggctggtgggcgtcgcggaaaccacaccacgcgtctttctcagcaggccgcgctcgaccagttcatcaatgtcgcgatgtgcggtcatcaggctgatgctgaagcggtcggtgatgtcctcaatacgaatcgcgccttccgccatcaccgcctcgacaatcagctggcgacgtgcaagctgtctcgcctggcgactgtcgctgggcagcgcttccgccatgaaaacgtcgactgcattattttgggaagcctgagtcatagtgagttccaaaagacgaattaacgtcaccccgtcggcacgagaagggcgacggggtgtcctgtaaaatcgacctattacagcgctgattgagcggtttggcaaatcagcgaagtaaaaaagcctgtaagaacggaaagttaacctgtttctctgcgttaattagacagtttgaacgcggaagtgtatttcgcgacgttatccttgttaatcagcacacagtcaaacagctgtttctcctgagccgcaccggttttaccggttttaaggaaggtatcggcctcatcaatcgccttggcggcaaattgtgccactggctgcatgacggtgtaggccagtgtgccggctttcactgcatcaaccgcgtccggtgagccatcgaatgcaccgactttgacctgacccagtttccccgcttctttcaacgcggcaatcgcgccaagcgccatttcgtcgttgccgctgatcacccctttaatgtcaggatgcgcctgaagcatggactgcattttgttatagccttgagtgcggtcccagttggcaacctctttggcaacctgtctgaggtcaggatactgtgacagtacggtatcgtagccgttggcacgggttgcggcattgttatctgacggcgaaccgagcagttcgacgtaattaccgctgtcgccaaccgccttgacccactccattgcacccaatgcggcaccctgcgcgttattagacaccagttgcgccttcgccagtccgctctggttcagctcggcgttgataacaatcaccgggatcccgccgcgatggctttcttgaccgatcctaccgagccgtcggcgttagcgggatcgaggataatcgctttggatttgttggtgatcgccgtgtcaatcagttggctctcggtgttggtatcgcctttatgggcgctgaccgtcgccgaatagccgagtttttcagcctgtgccttagccacctggccctcggtgtaccagtaagggttggaagggtcgttgacgataatcgtcatcaggcctttatccgcccaggaaggggtcgcgaacaccgtcattgcggcgacggcggtgaccatcaggaaacgtctgctgttatggaacatgtgagatactccagtgtttgtagggtgtagagttttctatcttcttgtttttaaatctaaagtcacatcacttgctgcgtcgtccgtactgtagcgtgttaagcagtacggccaatacgatgaccgcgccggtgaatacggtttgccagtaggcggaaaccccgataataaccagcccgtcggaaagaaagccgatgacgaatgcgccaagcagcgtgccgcgaacgttaccgcgtccgccggtcagtgccgcaccgccgataaccactgcggcgatggcggtcagttcataggtggtacctgccgtcgggcctgccgaggtgagctgggaggagagcaccagaccggcaatggcggcgcagacgccagagaggacatacactgtgattttgacccgttttaccggcacgccggagagcgaggcggcacgttcgttaccgccggaagcatacagccagcggccaaacgcggtgcggctgagcaggaaaccgcacgccaaagcgatgacacacagagtcagcacgccaatgggaatattgaagatgcggttaaagccgagccagtcgaagccggtattgccgagcacgctttcaccggagagtttgttgtaggtcaacccgttggtcatcagcagggcaataccgcgcgcaacgtacagtgagccgagcgtggcgacgaaggccggcacgcgaaacacggcgaccaggactccgttaatcaggccgacgaccgcaccgagtgcgagggtcagaatcaccaccgcccagaccggaaaatagaggatgacgccaaatgcctgcaggttgacgccctgcatcagaaagcctgcaaacacgccagcaaggccgagcgtggatcctaccgacaggtcaatgccgccgttgaggataaccagcagcatacctatcgccggcagcccaaagatagcgacgtgagacgccatggtcaggaagttggcagaattaaagtagttcggcgacatgatagagaacacgataataatcaacagcagggcgaagaaggcacggccttcgagcagcagcttggcgatgctaaagctgcgatggctcgagggttttttcgccgtgggtgcacgcgaggtgctcagggcatgggttctgtcgttcatgatagttcgcttccaatgttttcgtaaaatccgagtcgcctgaggtcagcgtggtcggctatcaggccacgagcgattcgcccgaggcggccataatctgttctttggttgcactggcgtcgaagatggcggaaatatgtcctttgctcatcaccacgatacggtgcgccacgctgaggcattcgcccacttccgacgtcgagtagataaccgccaatcctttgcgggcgttctcggccaatagcctgaacacttcggccttggcgccgatatcaatcccccggctcggctcatcgagcaggatgactttgggatgcgtcgccagcattttgccgatgaccactttctgctggttgccgccggagagggagccgatagtggcttcgccgccggaggttttcaccgtgacgttgcggatagactcatcgaccagctgcttctcacgttttggggacagcaccagccttttgacaaaatcgccgatgctggcgagcgtaagattttcaccgacggtcatggtctgaatcaggccatcgcgctggcggtcttcgggcaccagtgccagaccgctctcgatacggtcggcgatactcaacccagtgatctctttcccgttcagggtgatagtgcctttttcggcgttaactcgaccggcgatgcactccattaattcggtgcgtcctgcgcccatcaggccataaatacagacgatttccccggcgcgtattgccagcgacaggttgtctactaccttgatgccggtcgggcctttcaccgtgaggccgcccacttccagcgcggtattaccgaactcatagccggtcggcggtgagcccaggtcgaaatgctcacccaccatgttgcgcacgatccactgtaaatcgatatcctcgcgtttggcgtaggcggtcattacgccgtcgcgcagtaccaccgcgcggtcggttatctccaacgcctcttcgaggtgatgcgagatatagacgatggcgacgccgcggctggtcaaatcgcgaataatcttgaatagcacctcgacttcggcggcgctcagtgcggaagtcggctcgtccatgattaggatgcgcgacttaaccgacagtgcacgggctatttcaacaatctgctgctggccgagacgcaagtcctcaaccagggttaaggggtcgatctcctcctccagctcttccatcagttcacgggcgatgcgttcttcttcggcgaagttcacgccggtggcatgatgaagttcacggccgacgaagatgttgtcgcgcacgttcatattgggagagaggttcaactcctgatgaatgattgagataccgcactcacgggcctgattggtggaattgaacaccaccggctcgccgttgaggaggatttgccctgaactcggggttatcacgccggaaaggatcttcattagcgtcggttttccggcaccattttcgccgaacagcgtggtgacctgtccccggcgaatgtcgaaatccacttcttttagggcgtgagtcgagccatagactttgctgacattacgcgccgagagcacgatttcgccctcagtctggttatcaatgacgttgggatgagtgattacattgctcattggacggtcatccctactggcgttaccaaccagtttttcggattaagcaggcggaatacgccggtgactttgacggtttttccgctgagatgttgggtatcgatattgctcaataccgcttttttcatcgcacggttaatccccgaaccggcattctggtactcaatctggttcttgaaatccccaaactgaagggtgccggtcgcgtcgcgcagatcggtgccgttaatggccggaccggtttgcagacgcacctttatgtcgtccggcatgcccgcgactttaagtgcgtaaatgcccatctcgccttctccaactacgcctgttaacgaaacagagaataccggcatcgggctaccgacgccgtatttcgtcgtcgcagccgcagggtcagcgttgagcgccgtggcgagcgttgccgcatcgactgcacgcgattgaacgcttttctgaatctgcgggaaagttttgtccccgtagctgtccggattgaaggcctgctcggccacgtcttccgttgagccaattttgaccactttggtgttcaggccaatggccaccatcacagcaagcgtaacggccaaagcgacgccaatcttttttaaggttcgcggcgtgacctggttagaaaggattgaaagcgtcgtcatagcatggacctcatagtgactttccctcatggcctatatcacatgattagtgtgattattatcatatctatgcggcgttttgccgcgttgaaatgttataaatatgataactgttaatgttgaaaatgttatgcgtgatattttttgtcaatcgctttaccgactttttttgcggttggagatctggatctccttcctgtttgctttttagccttctcgacgttagttgcggatccttaacgcctgtatttatcaggagtttcttgtttaaataattgattttatttgtattttaaaattaatgcgaagttacgattttactgggagtctcaagctctctcaggatcacgtggtgattattatctgagttttccctgatgctggtctaaagacaataaagagtttcccgacaaatgtgatcatttatcaaacaaatttgtgatcgagagcgcttactgaattgaaaaattttatttgtactgaaatttaattcattctctatgttagcttagtgatatgtttagtttgcccctcaacattcgggagtaataaatggataaccgcgacattattctcggcattgactccggaacctcggtggtaaaagccgtcgcgtttgaccttgaaggtcaacaattgggttgtgcatcggtcagaaatacctatcaacgtggagaagacggatcggcgctacagtcaatggataaaacctggcatgactgtgttgatgctattcgtcatcttgccgatgacatcgagaatctggcgtcgagagtcgtggcgctggcggtcacggcgcagggagacggcacctggctggtggggaaagagaatcgtccggtaggggatgcgtggatctggcttgacgctcgcgccgctgataccgtccgccagttggagcagtctccgctttctcgtgagcgattcagcgccaccggcaccggccttaacacctgccagcagggcgcgcagcttgcctatatgcaggcgcatcaccgcgaactgctggagagcgccgaggcggtgatgcactgtaaagactggctgtaccttaacttgaccggcgtgcgcgccacagatccctccgaggcgagtttcaccttcggtaatttccgccatcgcggctacgaagacgtggtcatcgaggcattggggcttcaggaacgacgctatctgttgccggaaattgtcgagggtacccaagtaacgcatccgctcacgcccgaggccgccgaggctactgggctgctggcgggaacgccggtctgcctgggctatgtcgatatggtgatgaccgggctgggtgccggtgtgcacaccggcggagacgcctcctttaacaagaataccgcctgctcaatcatcggctctaccggcgtacacatgcgttcggtgcattcgtccgatgttttcctgaatcaggcgcagaccggctacgttatcacgctgccgataccccatcaggtgacgcagatgcagaccaacatggccgctacgctcaatctcgactggttactcaacatgacgctgtcgcttatcgaggagtttggtggcaaggcggatcacgccacgctggtgaagcacctcgataaatggctggagaacacccatcccgacgaactgatgtatcaccctatatctctctggccggtgagcgggggccattcgttaatgccgacgcccgcgccagttttattggtctgcgctacagccacggctacgccgatttgcttcgtgcggtgatagaggggattggtatggcggctcgcgactgttatcgggcgatgtctgctcaaacgccgctcgagctgcggttgtccggtggcgcggtgcgttcggcgaaggtgcggcagattttgtccgcctgtatcggggcaccggtgcgggtcagcattcgcgatgaggccggggccgcagggcggcgatgatggccgccgtggcgattggcgcttaccccgatatggaaagctgtattgccacctgggttacgccgttgctgagtgtggtcgaaacgccttccccggcgctggtcaaccattacaaccgactgttcgagacctatcggcaaacgcgttcgctgttaccgccggtgtgggccgagttgcagtctctgaaaggagtagacaatgagtgattcagacttgttggacgtttttgtcattggcggcggcatcaacggcgccggtattgcgcgcgacgccgccggacgtggcctgtcggtgatgatgtgtgagaaagacgacctcgctcagggcacctcttcccgttccggcaagctggttcacggcggtctgcgctacctcgaatactatgaatttcgtctggtgcgcgaggcgctgattgaacgcgaggtgttgcttaactctgcctgtcacattatctggccgatgcgctttgtgctgccgcacagcccgcaggacaggcccgcgtggctggtacgccttggactgttcctctatgaccacctgggagggcgaaaaaaactgcccggcacgcgttcactcaatctcgaccgaagccctgaaggcacgcctttgctcgacgaatatcatcgcggtttcgagtattccgactgctgggtcgatgacgcgagaatggtgacactcaacgcgcttggtgcgaaagagaagggcgcgacaattcttacccgcaccgcctgtgtgatggcgaaacgcagcaaggaccgctgggagatttttctgcgcgatgaacatagcggcgagatgcgtcaggtattcgccaaggtacttattaatgccgccggtccatgggtgctggatatcgtcaaacaggtaacccacacccgcagcgcgcgcaacgtgcggttggtgaaaggctcgcacattattgtgccaaaattctgggaagggcagcaggcctatctggtgcagaatcatgataaacgggtgattttcatcaatccgtatgagggcgacatggccctgattggcaccacggatattccctatgaggggcgcgccgaggacgtgaaggcggacgaaagcgagatccagtatctgatggacgcggtaaaccgttacttcaaggtcaagctgcgccgcgacgacgtgataacccatttctccggcgtgcggccgctgtttgacgacggtaagggcaatccgtctgccgtgacgcgcgactacgtgttcgacctcgatacgcaggggggtgcgcctatcctgcacgtgtttggcggtaagataaccaccttccgcaagctggccgagcacgcgatgcaacggctgaaagaggctctgccgaacatgggaccggactggacgcgggaaagcgtgctgcctggcgggagattgaaaacgccgatttcgaggccttcagcgaaaaactcaaaaccgattacccgtggttgccgccgtcattgcgtaaacactatgctcgcctctatggcgcacgaaccggcaatctactggcagaggccaccacgctcgccgacctaggacgccatttcggcggcgatttttacgaggccgaagcgcgctacctggtaaaaaacgagtgggcacagcgaccggaagacattctcaaacgccgcaccaaacacgggctacatctttcggaagatgagattaaggcgttcgaacagtggtttgaacagacgctggtcacgcagccaccggtgattttacaggcaaacgccagctgaattaggggcaatgatggcactcactctgtctttaaatactaatccgctggtgaatcgcttcgctgaaccggaagacctgatttacaccgtagcgcgcgatattcgcattcgagacctgcagttgactcacgaatttatcaatccgtcgtggcctgcctcgaccctgcgcagtctcacccggcgtatgaagacggcgatggagagtaccggcgtgcgggtaacttccggcatgactggcccctacgggcgactgaatcattttggtcatccggatgccagcgtgcgccgctattacgtcgactggttcaaaatttttgctgacattatcgccgatctcggcggaaaatccgtgggttcgcaatttgctatctttacttatcaagattttgactataccgagcgacgtgaagcgctgcaaaataccgcgctcgattgctggtgcgaagtcgcggagcatgcgaaaacggccggtctcgagttcctcttttgggagcctatgagcgtgggaagggagtttggcgaaactattcaggccagcctcgacctgcaaaaacggctgacggagaccgcgatggcgattccgatgtggatgatggcggatatcgatcacggcgacgtgacctccgataatccacaggattacgatccctatgcctgggccgccgccgtgcctcgttactcgccgattattcatataaagcaaagtatgttagataaaggtggtcatcgacccttcactgcgcagtataatgttaacggtcggatccagcccgagccgctacttaaagcgtttgccagcggaggcgcgcgagacaacgaaatttgtctcgagctgagtttcaaagagcgtgagccgagcgaccggcaggtggtcgcacagattgctgagagcgtggcgttctgggcaccgtatattgattccggcagccagcacttatcgctataacggccgttttatcgtggatgataagggcaatacccttgattataatgatgatatcatcaaacctttactggagtttttatgaccgcccctattaagattgcctacgtcaaagccaactggcatgccgatatcgttaaccagacgctggtaggctttaagcagtattttgaaagcaacaaccaagcgtatgaaattgaagtatatgacgttcctggcgcttttgagatgcctctgctggccaagcgcctggcaaaacgcggcaacatcgatgccgtggtctgcgccgcactggtggtagacggcggaatttatcgccatgacttcgttgcgcaggcggtcgttagcggcctgatgcaggtccagctagaaaccgaagtcccggtgttctcggtttccctgacgccgcacaacttccaacctgaaaaagagtttaccgagttctatcatcagcacttcatcaagaaaggcgctgaagcagccaaagcggtctgcatggtacacgcgattaaatgacagggttgttcccggggtaatccatgaaacattcttcctcgcaggcggacgctgacgactcccttgcactacgagccgcatggctgcactacgtgggaggactgactcaggcggacgtggcaaaacgtcttggtttaccttcgttgaaaacacaccgcatgattgcccgcgtagtcgccgacggggcggtaaaagtgaccatcgacggcgatatcgttgaatgcgtcgagctcgaaaatcgcctgcgcgacaactttgggctgagcttttgccgcgtcgcaccggacctcgccgaaagcgggctgccggtgcgggcgctcggtatggcgggcgcagactatttgcgcagcctgctggcgtccggcgagatgactacgctcgggctgggccatgggcgaacgctttcctccgtgattcaccaacttccccgaatcgatgcccagagcgtgcgctttgtgtcgttgctcggctgtctgacccgcaattatgccctcaaccctcacgacgttatgcatcgcattgccgagaaaaccggcgcgcatgcctacattatgccggtgccgttcctggcaaatacggtggaagataaagaagtactgctggcccagcgcggcgtgaaagaggtgttttctatggctgaaggcgccgaagtcaaactggtgggtatcggtaccgtcgaggctgcggctcagctggtggaagcgggtatggtggaagagggcgaaatgctcgatatctctgcctcgggcggcgtgggtgaattgattgggcacttcttcgaccgacacgggcgggtaatcaacacccagctcaccgcaagaatgctggcggtcagtctggatgccaatcgcgccgacaaaattgtggcgattgccggtggcgagaacaaggtagaagcgattcgcgccgtcctgtccagcggcctgctgcatggcctcatcaccgacgaggtaacggccagtgccttgataagttagcctgctgcagtctcgtgcaggcgctgccagacaattcttccttctgctgtgcgttcaaacacggcggttgaatggcgcagcgttgcggggttgccaggctgcgcctgcttttcctgatagctcacgaccgcaccgttcggccattcgctgatgatatgcagcgcgaagacctcgatttctagcccgctttttgcccctccgctgctgcggaaaaactgcgtcagcccggcgtaatccaatgcctttcctgcgatgcccaccatgctataccgcgggctgaatctcgacagcagttgctcgcataccgcttgtggcgcgtggcctgccagccattgctggataagaacgtgtgcctcgataacttcattaaagtaagggttgttgtgctgcatagattctccaaattattgtgcgagtttttccacgatggcgttgtctttgaggcgcagacagagcgccacaggaatcacgctgcttagcgccgcgacgacaaagcagttgcgataggcaagcgtgaccgagccttctgttagcgttgaaaacaggttaaacagcagacccatcagcgtgacgccaagacaaaagctcagctggcggttgatgttccacagcgcactggcgtcgcccagctgcgcgtcgtgagtctcgataaacgccgcgctttgtgccgtgctgctgcaaaggctgctgccaaaccccatcagcgcgaaacaggtcatttgagtcagtctatcgtccccgctgccgataagcgtgagcgcggcgatgcccaatccattgatgaggcatcccgcaataaacagcgggcgcggtccaagacggttaaactgcctgccggtcaggctgatggcaacaaaggccgccagcgcccatggcagcataagctcaccgacatgggtggccgacatggcaagctggttttgcagataaagcatggcgagcaggctgacgccggtaaacagaccgggcaccagctgatagatgagcatcgaggttcttagcagcggcagtgcgaccagccgcaggttaagcagagggtgagtttttcgaagcgactggcgtacgtaaatcgccatcagtgcaatcccggcgagcagcagcattgcgccgccgattctttcagtacgagtacccagctgagtcagcccgagcagaatcagcgttaatgcggcgcatgacatcagcagtccgacggcatcgaggcgggtcttcaccgctgccgtttcatcgttacgcagccaaaatgcagccagcagcagcgtcagcgtcgccagcggcaaagaggcaaaaaatacccatcgccagccgaggccgtcggcaatcaccccgccgagcgccggagaaagcgccggagccagcaaccccacgagcataatgaccgccgagagacgcgcacgttcattggcgggatagagtgaataggtcagcgtctgaccgatagggataagcagcccgcccccagcccctgcgctacgcgccagccgaccagtgaggtcagggagttcgccgttcctgcgcccagcgtcgcgaccataaagaggctcagcgagagcagaaacagccgttttgagccgaggcgagcggcgagccagcggctggcgggaataatcagcgtcaatccgatgatgtagccattgctgacccaggcgagctgttccaccgtcgcatgaaagctgcgtgagatggcgggataggccacgttggaaataaacatgttaatcaggtcgataaagaaaccaagcaggtaaacaacggccacgcgcattcgataattcatagcatccttcatcgcacttccagctcaagaatggggagtgtagacaacaaaaggaagcggataaaccggctaccagcagttacactgtcaaaaatattttgacagtaagggggcgtcatgctgaattttcaacggctggagatgttcgtcaacgtagcggcggcgggaagttttaccgcggctgcggcaacgatggggctgaccaaggccgtcgtcagttttaacatcaaacagcttgaggccgaactgggcgtggcgctactgcatcgcacgacgcggcgggtctctttgaccggcgcaggggaggggttttatcagcgctgcctgctgctgttgcaggacgcagaaagtgtgcttgacgaggtcaggctcgatcatcaaggcctgagcggtacactgcggctgaccacgacgccagagtatggcgcgcgggtggtggtccctgcgctaacctcattcagcgagcggcatccgcaactgcgcatccagcaggtttcttcctcacagcacaacgatttaatctccggtcgttttgacgtcgctatccgcctcggccagctcgccgactccagccatcatgcgaccctgatcgacagctttgccattctccctgtcgcttcacctgcctatttgcagcgctatgcgccacagggcttgaatacgctcgagcaactggcgcaggccaaatggcttgcccacagtcggttaagcacgccgctaagctgggtcgtgacgacaccacaaaaagtgagttgcctgtttagcgttgagccagatgcctgtgtgactgccgacagcgccgcagcattgctgtcgtttgcacttcatggggcgggcatcgccctgttgccgcagtggttggtcgcggagcacgttgcaaagcagaaattgacggtgctgttgcccgaccaccagtttccgcgacagggagtctatgcgctttacccgaatacgtgctacgtgccggagaaggttcgtctgtttattgagcatttacgtgccagcgtaggcgaggttaatgaagtgtgatctgcatcacacttcatcggtaatacttatctaattttaattataaatagttaattcctattatctcggcgtgatatcaagattgactggaaataattagcgaaatatcggcaagcgagcgggaataattaggcagcaacagaatagcgacaaagcgtcaaaatcgtgagtctgcaaacgttatgtaaagagcagttaagtgcaattatgtctaataattgcacttgatgacgcgtgagcggttacatcactctccctttctaccccatatataacccgcaagttagtgttgttaaattcgccttggaattattattgaccgctaaacagcgaattgcgtacctattggtacattatttccatcccgagaaagcactcggttgctttgttttaattcattgttttgtaattattttttattttatagaatattctataattaggtgagtgctggcgaggcgtcttttttgaatttcgatattttattctgttctctggttgtgtaaccgattacactctttcgtggatacatatttcatacgtctggataacttaaaaaatcaggggcgttaactctgcgtgctatattttttaaaataaggccattctgtaaggaactgtatatactcgtcgcttaattaaatttatattatgcaactgcgtaacagggtcgctggggattacgagtttcaccgacttattctgaggagtcggcaggcgcgtaagcaggcttaacttacaaatcgaaatctttccgtgaataacaaaacttcaatttcaactttcgttattttgtctattttttggccattatcagtaagttacgcgcaaaccgcagtcactgcagataaatcttcggcgaaggacaattcggttaagtctgactcaacgcaaggcaatacgctgcttatcgttccccagcagcagaataccggcctgtcggagcttgatactcccgccgccgtaagcatagtcaacggcgacgacgtgcgtgacagcaagcctcaggtcaatctttcggagagcctaaccggcgtccccggcctgcaggtacagaaccgccagaactattcacaagatcttcagctgtcgattcgtggctttggtgccaactcgacctacggcgtcagcggcgtgcgaatttacgtggacggtattccggcgactatgccagacggtcagggccagacctccaacatcgacctggcctcggtcgacaagattgaagtgctgcgcggcccgttttcggcgctgtacggtaacgcctccggcggcgtggttaacgtcgagacccggtctggcacccagccgacgacgctgactgccggcacttatttcggcagctacggttcgtttcgcaacagcgtcacggcctcgggtgccaccggcgatggcacccatgcgggtgatgtgaattacaccctttcggcttcgcgttttaccacccagggcttccgcgaccacagctcggcgcgcaagaatctgggtaacggtaagcttggcgtacgcctcgacgatcgcagtaccttgacgctgatgtttaacagcgtctcggttgatgcgggcgatcctggcggtctgaccgaggccgaatggaaggcaaatccgacgcagtcaccgcgcgccgatcagtacaacactcgaaaatctattgaccagacgcaggtgggtttgcgctatcagcgtgaaatgagcgacaacgaccagctcaccatcatgacctatcagggtgagcgtcataccactcagtatcagtcgatcccgaaggcgacgcaggcgaatccggcttatccgggcggcgtgattgtgctcgagcgccgttatcaggggattgacacgcgctggaagcataacgaccagtggggatcggtgcctttcaccctcattggtgggctggattatgaaaccatgaccgaacgtcgtcagggttatgagaatttcgtggtggagaatgactttaccgagtacggcgtgaagggtgacgagcgccgtaacgaaaagaacaagatgtggaatctggacccttatctgcaaacgagctggcagctaacggaccgactgacgttgaacgccgggatgcgctacagcaccgtgagcttcaattcgaaagattattacattaccaccggcaacggcgatgacagcggcagtacgcgctatcacaaagcgctgccgatggcttctctgagttatgcgctaacgcctgcctggaacgtatacgtttcagcggggcgcggattcgagacgccaaccattaatcagctgtcttatcgccctgacggtacggcgggtctgaatatcaacctgaaaccgtcgaccagcaacaccgtcgagattggcagcaagacgcgtatcggctatggcctgttgacggcagcgctgttccagaccgacaccgacaacgatttggccgtcgcgaccagcggcagcgggcgcaccagttataccaacgtcggcacgacgcgacgtcgcgggcttgaactgtcgttcgatcagcagtttgcctcagactggcgcgtgcgcatggcctggacgctgctcgatgcgacctatcgtgatgacgtcaatacggcagtgagcagcattcctgccggtaacaagatgccgggtattgcgcgcaactccgcttacgcctcgctgggttgggcgccgccggaaggtttccatgcgggcgccgaaattcgctacatgagcgatattcaggccaacgatgccaataccgctcaggcaccggcttataccctgaccagtctgaatgcgggataccgtctggactggcgcagcaactggtcgctggatttatttacccgcgtcgacaacctgttcaacaggaattatgtcggctcggttatcgtgaacgaaagtaatggccgttattttgaaccggctcccggaagaaattggggcggcggcgcaactcttacctatactttcgaataattgcacaaaattcatacatggttacctgccagggaatagacgggaccgttaaagaacctagagtaagccagttttttatactcatttaaccggggtattgctgcggctggcttgctcgaggaaggacattccgtgcttcgccgaatgtttttaagatctcctttttaatgggcgagatcgaagacaatgaaaatcttgtaaggttaataatatgcaaactaaagcttcgttatcgcgcatcgtcgttataattaccgctttgttcgccgcgttaagcggattatatctgttggtcggcgggatctggctgactgcaatagggggctccctctattacatcatcgccggtgttgtttatctggcgacagcatggctgttgttacgccgccgtgctggggttttactgctctatgccgtattcctgtttgccaccactctttggggtctttgggaagtagggtctgacttctgggccttgacgccacgtttagatgtgacgttcttcctgggtctgtggatcctgctgccaatcgtttataactacatgagcgtcaagaatgccgttgcacgtggtgcactggctctctctctggtgttcaccgtcgtggtactggtttactcagtattcaacgatccacaggaaatcaacggcactatccctgctgccgacaatgcgcctgtacagtctaccccaggcgttgctgacggtgactggccggcatacggtcgtactcagggcggtacccgttattctccactcagccagatcaacgacaagaatgtgggtcagctgaaagaagcttggtcattccaaacgggtgatgtgaaaacttcacacgatccgggtgagataactgacgaagttaccccgattaaaatccacgatactctttatctttgtactcctcaccagaagctgtttgctctggatgcggccaccggtaaagagaagtggacgtttgatccccagctgaaaaccgacccaaccttccagcacgtgacctgccgtggcgtttcttactatgaagatcctgctgctgcacaaagcaacgagactcagggtgccgctccggccatctgttctcgccgcgtcctgctgccggtcaatgacggtcgtctgtttgccctcgatgcagaaactggcgcgcgttgtgcagatttcggtaacaacggcgagctgaacctgcagagcaacatgccttatgcgactgcgggccgttacgagccaacctcaccgccgattgttaccaaaagcgtaattatcgttgccggtgcggtaaccgataactactcaaccaaggaaccttcaggcgttatccgtggtttcgacgtacatacgggtaaactgctgtgggcatttgacccaggcgctgcggatccgaacaagatcccaggtccgggcgaaaactacacgcctaactcaccaaactcatgggcacctgctgcctacgatgcaaatcttgacctggtttacctgccaatgggcgtggaaactccggatatctggggcggcaaccgtactccagacatggagcgttacgcgagcagcctgctggcgctgaatgcgaccaccggtaaactggcctgggtttatcagaccgtacaccatgacctgtgggacatggacgtacccgcacagccaacgctggctgacatcactgacaagagtggcaacaaagttccggttatctatgttcctaccaaaaccggtaacatttttgttctcgaccgtcgtgacggcaaactggttgttccagcgcctgaaaaacctgttccacagggcgcggcaacgggcgaccatacgtctccaactcagccattctctgacctgactttccgtccatcagccaagctgaccggtaaagacatgtggggcgcaaccatctacgaccagctgatgtgtcgtgtgatgttccatcgtctgcgttatgaagggacctttacacctccttcagagcagggcacgttggtattcccgggtaacctgggtatgttcgagtgggcggtatctctgttgacaccgatcgtcagctggctattgctaacccgatcgcactgccgtttacctctaaactgatcccacgtggtccaggtaacccgattgaacctccagcgggtgcaaccggcggtagcgggactgaatctggtatccagactcagtacggcgtgccttacggcgttgaactgaacgcgttcctgtctccactgggcttcccatgtaagcaaccttcatggggctacatctccggtgttgacctgaaaaccaacgatatcgtatggaaaaaacgtatcggtaccgttcgcgacagctcaccagttccattaccgttcaaaatgggtatgccaatgctgggtgctccgacctcaaccgcgggtaacgtcttcttcatcgcggcaacggcggacaactacctgcgcgcattcaacatgagcaacggtgatcaactgtggcaggctcgtctgccggcgggggtcaggctacaccaatgacctatgaagtgaacggtaagcagtatgtggttattgctgctggcggtcacggttcattcggtaccaagctgggcgactacatcatcgcttatgcattgcctgacgatgctaaaaagtaattaacttaagagcggctgcggctgcgcgagagtgaaaacaagaggccgctgattgattcagcggccttttttttatctcgaaggtggataaaaaaaaggcatcaacaggtcttgttaaggttgttttattcttttaaaagattgaaaaattggagttttttattagtgggatcggtaacgtcttgtctccattccacgagaagcgctgttaacgtgtttaacatcttcggagagaactcaccatgtaccgtccggcattatcagcaagcaggcctgaaataaacccggctattcctatcaacctccctggtgaagtcacggcctcattttcttcagccattcccgacattcaaaacgtgctcaacagcaacatgaatcttgcctcattaacgctcgaacaaatcaggaggcgatatgaaaaaagtgcccataattccgcacctataaatcgctctcagcagggaggctccgtctctaaaatgccgcccgctgcgcctgttaacgagcggaagtcggttatcgttgcgccagaaaaaaggctagcgaattttacgcccgagaccctgcgtgatatcgccgagctgatgcttagaacaccaggaagtttcaacaatcagcttggcgatcatgtgccatatttactgatcaattcgggagcactgcccagacgtgcggtcatctcggtgcgccagaatgatgagccgccgaattacattcgtgctggtcaacagcaacagtccagaatgcctcgtgaaatagtcatcgaattacggcgcacctttaggctgggagacgatgcgagcgcacactataacttgattcgcgacggggtatctgtcaccaatgctccagacggagaatgcctttatcgcgccatctcacaggggttagctgacatggatatccagatcagcattgagcaactcaggtcaatcgctgccgatgaactgattagccatcccgcacgctatctcggcgcgattgaccgcgatatcttagatgaggagtatcaggcgctttgtgaacaaaggagcgcctgtgatggcggcaagctgcctattgaaagcgcaccagagtgtatcgatatcgattcactctcaagctccgccagccatctttcgattgaagaaggcccctcggcgaaaaaacccatgcaccgccaagagagagagccgggtatttctacgcggctagcaggattattacgagatttgaatggcttacatcatgcagaagcgcaggagctgctcgacttgcttattgttgaacaggtcgtgaaatacgcgagtacgggcattatgagcggagaggctgaaaaggtcggcgggcgggttatacacagcgtagccgaaggtttattggatgttttgcgtagaaaagagaagcctgaagatgaggttttccgcgcgcttttcccggacgcctttgatgacaaagtggtctttgtaaatgcgctcccgattatcatgcatctccccgccggactcagggtgatggaattaatgcacttgctgagcaaagatcccgcgcttaaagagactatcaatgtttttttacattattcacacgttgctaaccgggcaaagagtcttgaatatatcaatgccaaaaatttctttgaaagggtgaaaatttctgcaggttcgatcaccaggatgactttggtcgatagggaggtattaaaacgctgtggagctaataaagagtctgccgatttatcgaaagtcattatggatcactcaataaaactgctcgaagattctggcttcaccagaaagagtctcctaaccacaaagttatttccatcggggagaatgggcggccggccaatgagtgtaaaagaagtgcagctctctgctggaatcttgtataccggcaggcgacaggctgtctcagagtttacattgcaaaagcttcagcagttggattacgtcagttattctcgtttcctcagtcgcacccttgggcttcggagtcacacgcagcaggtaaggacgcagtcggatgccaaatcctcgcaaagctacaagctttcaaccctggcggcggtcgccgcattgggggcatcggctcagcacagcgtgcatctggcaagggcacgcaatgccgaaaaagaccgcgaatgggagactgggaatgaagccggcaaggtatatgaccgtgccgtgcgcgataacttcaacgaaagagggcggcttatggcgcctaatttgatcggcatcggctttaacctggcgctagactctatgcaccagcaagaaaggcaactgccctcaaggccttccccactgaggatgaatccaattttcaagcagcccgcgctgccgcctgagagtgcccctgtcactgtgcctggggccgaggagaatgagcctatcgctcacgtccttccacgagcatcttcccgctcaagcctggtttcaggcactggtatggccaatttattcgatgttgattctgcgataatggatcaagcggaagggatgatggataacctgagtgaattggattgtgaattcgaccgcgagcacttgaaatccagggtggctgatgtctacgcgacgcaatctgaatttaagagcgataacgaaatcaaaaaagagctcctcaagatagactatagagactatgttaaatttcgcgagcctgaacaacagcagaaacggcggcaactttatggaccgctgaatgccaactggctgccctccaactctgaaagctcgccacagaaagaactttcaaagactgagcgccagcgcgaaacggagaagtcatcgatttaacctgccaagagccaaggccacttcggtggccttaaaatcagaatctttcagccgttcaattttacccattgccgtctacagttaactcatccctgtctcactaacaactggcggaaaatgaatctattacgtcccttcaagcattactatcaaagccgtcccagactgctagctgcgctgctgctgggcattttgagctttttcgccttaccctcgaaccagccactgcttcaacgattgctgattagctggaacgtactggcgtgggtgtatctgtttttcctgtggtggatgatgctaagaacggcacccaaagggatagcgcgtattgcacgtcagcaggacgaaagtgccaaaacggtactggcgctggtctgcgtcacctgtctggtcagcattctggcgattctttttgaactggggcggtaaagaatcttcacggggtagacaaaattctgcacattgccctgactgccgcgacgctggtagtttcatggttcttactgccgacgtcgttcaccatgcactacgcccacatgcactacctgcacagcgacggtgacgaaaaggtgttgttgtttccggataaaatcccgcagcccggctactgggactttgcctattactctttcacccttgcggtagcggcgcagacggcggacgtcgggaccggcaacaccacggtgaggaaaataaccctgctgcaggcggtattgtcatttattttcaacctggccattttagggctgtcgattaacgttggcgcggggttgatgagttagccataaatgtcatattccgcttgaaatcatcaacctaatgacgttatgtctattattcacttttctttgcagattatttcagggctggatactgatgaataaatggatgaacaccgtcaccgcactcctttgtctgggatttgccatgcaggcatcggcaaaaaactgcaccgaagtgcgcgccggtatcgatatggggtcgggtacgaccaagattcaggtcagcgaagtcaatgtctgcaatagaacgctgggcaaggtgctgttctcgcaggaaaggccgattggttttaacgaagatctcgccgagtctggcaataatcagctcagtccggcgattcagcagcagggcatgaccacgctgaaagcgttggtcagtcaggccgagaaattccacccgaagcgcattaccggcgtcgcgacggcggtatttagagccgcgagcaatgggcagcaggttatcagacagtttaatcagcaggcgcacgtcacgattaggatcattactcagaaacaagaggccgagttgggctttatctcggccaaggccgcgctgaacgatcccaagctaaaagactccgacctgctggtctgggacattggcggtgggtcgatgcaaatgaccacctatgacaggattgatggcttcaaaacgccggagatctatgagggcaaactggcgtcggtgagcctcaaggatatggttattgaggtgatgatgaacaaaaatctcactcaggtgaattcgccaaatccaatcgggtcgctagccggtgagatcctccgtttcgttaatttctatgctcgcacccacgttccggctgaaatcaaacaggcggcaaaaagcagaaaagtagtgggtatcggcggcgtgcacggctattcaatcaaagagcagcttcatccgctgaacaatcaatacaccgccgcagatctcgaccgtgtcgcgcaggtgaagattaatcaaaccgatgcccagctgccgggcgattatcgcgccacggacgttaccaatctgctgctggtcgaagggtttatgcaggcgcttgggatcccgcaggttacgctcgtaaaggcaaacctgattcagggcattctgttgaaataaacagctcgaaaaaattaaccgttgagcggtaaatttgtgccgctcagaacatgcaggagcaagcttatatggtatctggaacctccacacctcagtccgaaccggttgacgattttgtctggctggaagagataaaaggggaagtcgccgtcgagtgggcagtgcaacagagcaaacagacccgtcgcgaattcgccgaaagcgatcgttttgagcagattcgcagcgacgtgtttgactgcctgaacgcgacaacacagatcccgatggtggttaaacgcggcccgcatttttataatttctggcaggatgaaaagaacccgcgtggcctgctgagacgcaccagctttgaatcttatcgcagcgacaccccagaatgggaaacggttctcgacgttgacgcgctcggtgcggcagaaaacgtcccctgggtttatcacggtattcaggcgctggcgcccgatttccagcgtgggctggtgcacctttcgcccgacggcggcgacgcctcttccgtgcgcgagtttgacttaaccacgctgtcgtttgtcgaagatggctttaacctgcctaccgccaagagccgcctgacctggatagacaaagaccgattgctggtggccaccgactttggccccgactcaatgactacctcggggtatccgcgtattgccaaaatttggcagcgcggtacgccgcttgaggaggcgcagacgcaattttccgccgagccgacggatatgtcggtgatggtctttcacgacgatacccgcgggtttgaacgcagttttgtggggaaggtgatcgatttttaccaccgcgaagtttttctgctggataacgataacgataacggtctgttgcagattgatttaccgcaggacgcaaggttcagcacttggcgtgaatggctgctgatttctttatcaagcgactggcacgtggcggggcaaacctatcctaccggtgcgctgttggtgactgacttcagggcctttatggcgggtgagcgtcagttcaagaccctgtttagtcctgcggaaacgaccacgctggacaactactcgatgacccgtgattacctgatcctgagcatcatggacgacgtagtgaatcgcctcgaagtgttgaagccagaaggcgggctgtggacgcgtcagggactaggcgatgcgcccgagttgagcaagataagtgcctcgggcatcgacgacgaaaccaatgaattcttcatgactgtcacgggttttctgcaaccgacctcgttgtattacggcgtgctgggcgacgagcagacttcctccgagataatcaaacaggctccgagccactttgacgccgagcattatcaggtggcgcaacatttcgtgacctcggacgacggaacacgcgtgccgtactttatgatatcggctaaagatatcgaactcgacggcagtaatccgaccctgctttacggttacggcggtttccagatatcgctggatccctactatctcggggttacggggcctgcatggctcgagcgcggcggggtcatggtgattgccaacattcgcggcggggagaatacggcccacgctggcaccaggcggcgctcaaggacaaacgcctgcgcgcctacgaagacttctcgtcggtggcgaaggacctgatcgcccgtaaaattacctctccggcgcatcttgccgcgcagggtggcagtaacggcggcctgctggtcggcaatatgttgactcgttatcctgagctgtttggcgcgattgtgtgtgaggtgccgctgctcgacatgcagcgctacacgcgtatttccgccggtgcgtcgtggattgccgaatacggtgacccgcagaagcccgaggagtgggcgttcatccaggctttttcgccgtatcagaatatcgacccgttaaaaacctatccgccggtgctgtttactaccgcaaccagcgacgacagagtcggtccaggtcatgcccgaaaaatggcggccaaaatgcagcagctgggcattgagaacgtctatttctatgaaaacaccgagggcggtcacagcgcagcggccgataaggcgcaaaatgcctttaagcgagcgatggtgagtgagttcttatggaagtatcttgctgaaaaataaaccttagcaacaggctgcccggcgctgtgtcgggcagctcctgtctgcggctgttaatcctgaacttttcacttacccgacgtgatattcatatttagacatagttaaaactctgttctacaggtaaaaacgttgcccgccaatccgctaaatgtttattatttgaacctgatttgataatggttattagaatcattcatatttataaatcattttcctggatgcaaaaatgctgaaaaaaacgacgcgcgtgctttccgttgccggcctgatggcggcctcttttgcgactttcgcaacgacttatccgctgacggtcaccgaccttgccggacagaagctgaccattaataaagagcctgagcgcatcatcattcaggacggccgtgacattctgtctctggctgtgttggataaaagcgatcctttcaagcgcgtagtggcctggaataacctgcttaaaaacaccgactccggtacctgggacatgctgaaaggcaaatggccagaatcgaccaaaatcctcgacatgggattcagcgacaaaggccaggttgatctggaaaccgttatcgctaaaaaacctgatttgatgatagcgcagctgcgtgccaaacagtcactgcaacagggcggcgttatcgacagactgaatcagctgcatattcccatcgtcttcgtggattacgatatcaacccggcgaaagatacggcgccaagtatcgacctgctgggtaaagtgctgaatcaggagaagaacgcgcaggcctataccgctttctatcgtcagcattatcaacacattcaggacgaaattgcgtccatcaagaatcgtccaaacgtgtttattgaaccgctggccggtcgtagcgactcctgctgcttcactcacggtgaagagggctggggcaagctgattgaggccgtaggcgccaaaaatatcggctccgagctgctgccgggcgcgtcgggtgaagtttcgctcgaaaaagtcattagcatgaagcctgatgtctacatctttaccggttcaatccatccgggcaaagggcagaccaccatgatgcctttcggtttatcagctaaccaggctgacgtagataaagaagccaaggtgctgacctcccgcaccggtgtggcacaggtgcctgccgtgatggaccagcgcgtctatgcggtttaccaccagttctacaaccacccgtacaacatcgtcggcatggaatatttggcgaaatttatttatccgcagcagtttaaaaatttggatccggcgaagacgtatcacgaaatcatccgtaattacactcagttaccggacaaagatttcatcttcagctggcagccgaagaaataagcgtacacaactttacgcccgtcacatttgttgacactcagttaattcatagatgaaactaattgtattagtgtgagtgtcaacttggccatgctttcgcatggccagaataaacagtgatagggtgatcccatgcaatccgaagaacagcgtttgattgaaggtctttttagccgtttacaacaggctgagtccaatactgcaccacgtgacgctgaagccgagcgcctcatacagtcctacgtgagcaagcagccttccgtgccttactacatggcgcaggccatgatcattcaagaggccgcactgaagcgattgaatgcgcaggttcaggatctgcagcagcaggttgctcagttgcaaaaccagctgcagacccaggctcaaaacagcaaaccgcaaagcaccggcttcctggctggcttgttcggcggcggcggtcagccgcagaatcagcagtcctcaggcagcggcccgattccgggtacccagcaaaataacggctggggcaataatgcggcaccggcacagccggcttaccagcaggctccgccgacagcggccgctgcgccaatcggttctggctttatcggtggcgcactgaaaacggctgcgggcgtcgcgggtggcgttgtgttggccgatatgctgaccggtatgttccaccagagccgtcctgaagaaatcgtcaatgttgttgaaaataatcaggttacggagaatttcaatccatctaccgatccgctgctgagcggtgacaacgcctgggacaacccggtgtacaacgacaacaataacagcaatgacaacacctattcgggcttcctgaatgattcagacgacagcttctttggtggtggcaatgacgatgacgacgacgattctttcttctaatcgccttcgttgaatcggaaaaattggcattaagcagtatgaacggttgcagtaagtcgaagagtgagagctttatcgcttattgcaatcggatttctggacaaaagctgaatctattgctgtactgtaattgacacactttttgtgtcttacaaatcacgtaaaggtaagtttgatgtctaagattaaaggtagcgttaagtggttcaatgaatcaaaaggttttggtttcattacccctgaagatggcagcaaagatgttttcgttcatttctctgctatttcaagcaacggtttcaagacccttgctgaaggccaacgtgtagagttcgaaatcaccaatggcgccaaaggcccgtcggctgctaacgttatcgctatctaactctagccgatttctgaaaaacccgcagatgcgggtttttttttgcctgtcgttagagatacagcaaacaacggtcaggattttttggcgaaggtagggcgggcaagggtgaggaatatcaggatggcaataaagaaacagccacagatagtcagccccattgagagcgccgaggtgccgccaataccggttaatggcacggccgttgctccgagcgcaaacatgcagacacccagcaaggctgaggcgctgcctgcatttcttccctgactctgcatcgccagcgaccccgcattaggaccgataatcccgatattgataatcgagaagaacagcggcaccagcagcacggccagcggtgcatgcatcgcgcctgctaccaccagtatcaccgaggcaattgccgcaattgtcaggccaatcttgaccatcatcagctcgccccacatcaccgcaaggcgggatgagatctgcgctgcaaacaccagacccatgccgttaagggcaaagcacaggctgaaggtcaccggactgaggtggtaaatctgctgcaagacgaagggtgacgcgccaatgtaggcaaacattccggccatgataaagccctgcgtcaggcaaagccccatgaattgacgctcatgaagcagtttgcccactgactttatcatcgccactgcgccacccgtcgagcgacgttccgcaggcagggtttcatgcagtttcacggaggataagacaaacagcaggatggagatcgtcgcgatggctccgaaaattccacgccagctgaggaaagtcagcagtccgccgccgagaacgggcgcaataatcggcgcaaggccgttgaccagcatcaggagtgcaaagaatttagtcaggtcgtgtccactgtacaagtcacgcgctacggctcgagacagtacggcccccccgctccagcgatgccctgcagcagtcgggcaacgatcaattgatcgatattggtcgccagtgcgcaccctacggaagcggccagcagcaggagcagtgagagtagcagagggcgcatgcggccaaagcggtcactcagcggcccgaagatcagttgtccggcaccgagacccaacagaccggcggtcagactgagctggctagtggcggtgttggtttccagttctgctgccagagtaggcaaggcgggaagatagagatcggtgcagaggggccaagtgcggcaagcgaacccaataccagggcatagccgaggcgtttttgttctaaatggtcgttcattaattttccggagtgtgggagggagtcgagtcactaaagacttttaaaaagacttggttataaatagttttaagtgtttctggatcggcatgcgcctgcgtcaaacgacggaatgcggtgccttcacacatcacggccatcatttccagacgcgcagtcagctctttttccggcatgtcggggtagtagggggtcatcatcgctttagcttcgttaaacagcttggattcagcgtcgcgaaggattttctcaaccaccgggttacgcgtcgcttcggcagtcacttccagcatcagcgcatggtcaatttcattctgttctggactgagttcagggcagtcaattttgctgtgatcaatattttgtacgccaatcacccgatacgccagattactggccatctgtttcagattgtgggcaccgccggtcattatttgtatttttttgaagacgatacgtcgcacaatttcttcaatgatggcgtctttattgacgaaataacggtagatttgacccacgctaagctgcgacattttggcaatttccgccatgcctgcgccgtggaatccgtgcttacgaaaacacagtcgtgaagcggcgacgatctggtccctgcgggcacaaacgcgttggtcttttgtttggttagcgggatgcatagaggcacctgaaaagtaaaagtaaactttttttctcaaattaacccgcaatgcattttttaaattaaaaacgagaggataacttgagagaaaaagtgtgaacgctcgttctcaattatagggaatactgggggaaggtaaataattgtattataaatgtagcaaaaagagcttttgtccttagacaaaagctcttttaagggaattttggcgaggaaatctgcggttacagcagatagctatgcaggaagctcaacaccacagccaggcaaaaaacggaagtcgtgatttcgctggccgttgtcgggaatgaaaacatcgttagcctcaggttatctagacattatgctgtaataaactgaggctagtatcgctgccgaacgttaaggaaacattaaatcagagcgggagatgcgcaaaattaatgcccggtgtaccaactcaccagcatgaagcccagcagggtcagcgccagcgagccaaacaggttgagggcaatattaagcagcgccgcgccgaagcgtccgtcttgcagcatgtacaccacttctagcgaaaaggtcgaaaaggtggtcataccgccgcagaatccggtggttagcagcattttccacaccgggtcaaggtgggtcatgcggttgaaaatagcgatgcccaggccgatgataaacgctcccgccagattgaccgtcagtgttccaatcggcagcagggaggtggtcgggttgagttttaagctgatgaaccagcgggcaacactgcccacaccgccgccaattaatactgcaaggaaggtgttaaacataaatgcctttcatataaaagtggatgttcagaaaggtcccggcgtcatgctacgaacctctctatgagattgcgtagacatcattagccggtaaaggcggtttgggaggaatgtcatctccaactgcttgagcactgaacaagccgtggcttaaacaatgagcccatgatattaccgaagttgaatttgattgtgtagtattaacccaagcattagcccgagtttaaggaacaaagatgatcattcgtgatgcgcaaacggccgacgcggccgcattggtccggctgctcgcagatttggattatccagccagcgtcgagtgtatcgctcagcaaattatccgcatggagggcaatcccgacagcgtgctgtgggtgtctgtcattgacgagcaggtatgcgggttcatatcgctgcattttattcctcagctgccgctcgcaggcgatttttgccgaattagctatctttgcgtcagcgaccagcaccgcggtgcgggcatcggccagcgtcttctcgatgaggcagaacgtttggccagcgagcgtggctgtgaccgtatggaggttcacagccattcacgccgcgtgcgggcacaccagttttacgcccgcgcggagtatgaagagtcgcctaagtacttgatcaagcgcctgcgctaatctgatttttatctgaggcttttctgacgttttcctgaagattacaggcctcagcccatggccagcgcaatcgcgtcggcgatagtgtcgacctgatccaaacgcatcaggctggtgctggcgcgaataaactgcccaggtccgattcggctgcgttcgccgggcagcacggcaatgccacgtgcggccagcgttaccagcgcaaactgctccgaaggtaccggaatcaacacggaaagcccctcgcgtttcggcaggtggatcccgcgaaccgccagcgcatcgaccagcgcctgacgacgttgcgcatagactttcttcgcttcggcgatcccttcctgagtgaccggatcgttaatcagccacgccagcgcgtgttgcaggattcggctcgaccatcctgcaccaaaattacggaacgatttgatctgcttgattaaatcatgggatcccgagataaccgccatccgcagatccggtccgtaggctttagagtatgagcgtacatgcacggtgcgcttcggcaagaaagaccccatgctgcgcggttcagtgcaggccagctcaccgattccgtcatcttcaataatcagcgtctgactgttctgtaaaatagcggccatctgcgccatgcgttccgcgctgacgatatgcccacagtgcgagtgtgtgcgcggctgataaataaatgccgccggatttttgtttaatgccgccagcagagaatcagggacaggaccaaactcgtcgcatttcaccgcaatcacctgggcaccaatgttgtccagcatgtccagcaagcgggtcgcggtcgggtcctcaatcgcgacgaccgagccttgcataatcagcgtttgcagcgtcaggttcatggcatcgaaaccgccgtcggcggccataaacgcgtctgctgcatagggccagcttggctgtacggcatcaagcagcacctgagaaatggcttcgcgctgatagctgttgagattttcagtctcgacgctgctaagcaatgcctggttcaaacgaggcaggagctcgggatccggcgaggccagcgtcatatcggcgatgatattgtcgccaaagttgccgattttctcgaatcgtgcagggcgcggggagagcgtatcgccacacacccacaccccgttgcggcctctgccggcgataactttttggcgtctcagctgcccccacgccgctgacacggtggcaggactgacgccgagcgcctgagccagctcgcgcacggcggggaggtgggtgccgatttcaatcacgccagaacggatcatcgcggcggtctcaatggcaatgccgcgcatcgatctgtcctgcaaatggcctgcaaaccactctgcatcaagcactttctctctcaggctctcacccattaaatcaccttttgttcagtaacaaagattctattgtacatattaatttaagctattagtatcaaacttagtcaacggaggcgataaaataatcacattgggtcaggtgtgaaagctctccgctcggacaggctccatgtgtaaataagcaattttgccgacattaaggggaaagacgtggcgattactatcaggctggcagttcgcgattgggattattttacgccgttggcattgggcgatgtgaaggctgaagggttcaatctcgagattgaccgggtagggacgctggtaggcgatttagcgaccagcgaacagtatgacgccgctgagatctccttcagccgttatgcacagggccgcgcacggggtgaagacgacgtactggccgtgccgcatttcctgatgcgtggctttcgacaacgctgcatcatcacacgtgatgacagcccgttgaccaaaatttcagaactggcgggtaaacgcattggcgtgaccggctggcaagattccggcaacacctggacccgcaccgtgctgggcgtggacggagtgggtattgacgacgcttactggtacgcggggcgtctgactgaatcgcatcctatcgtcgatcgcctaaacggctttggtcgcgaggggcgtattgaagcctgtcctggcgagcgcccgatgatggaactgctgaaggaaggttggcttgatgcggtattcacgccgttcatgccggaaggtttcttcaaaccgggttccggtttccgtcagctgcagccggatttccgtcaggcagagctggagtactttaaccgtgtcggctacgtgcctggcatgcatattctggctatcaagtcggacgtggcggccgagcacccttggctggccgacgcattaagcaaaattatcgacaagtcttacaacgtctggatggacaagcgtgcgaaatatgccgacaccacgccttggttgttggacgatatccgccgcaccgtggtcgacctgccggtgaactggaacgacaacggcttcgagcagaataaaaaaatgatcgacgactttgccaatgagctttatgttcagggaattaccgccgagcgtttgacgcctgcgtctctgttcccggcttacgccaaataacattgggtgaacccttcaccaaatatacttttacgccttaaaaggcgaggggagtaagaatgaaagtcgcattaggccagtttgccgtttcccgcgaatgggaagccaacgtcgaaacctgtttgtcgctgatggcaaaatcacgcgaggcgggtgctgatttactggtgctgccagagggtattttggcgcgtgatatcaccgatcccgatctggtattgaaagctgcacagccgttggatggtcctttcgtgagtaagctgctggccgccagcaaaggcaacgcactgaccaccatgatgagcattcatacgccaacaccagacggtcgtgcattcaacgcattgatttctattagaaatggcgaaatcatttccgaatatcgcaaacttcacctgtacgatgccttcaatatgcaggagtccagaaacgtcaatccgggcactgaagtgccgccgctggtcgacgttgctggttttaaagtcggtttgatgacctgctacgacgtgcgtttcccagagctggcccgccgcctggtgctcgacggtgccgaagtgttggtgcttcctgccgcctgggttaaaggcccgctcaaagagatgcattgggaagtgctggtcaccgcgcgtgcgctggaaaataccagctacatcgtggccgtgggcgagtgtggtgaacgtaatatcggcaacagtatggtggttgatccgctcggcgttgccatcgcccgcgcggccgaagcgcctgcgctggtctttgccgacattgaaagggaacgtctggcccatgcccgcaaagtcttgccggtgctggaaaaccgctgcttcgacgtaccgcagttgaaataaatatcatcacaacggctgattgaacgtgtcaacctaacgttatcactcagttgagcagtaaagggcgcgaaccaacaccagggagcgctttctcaaaccgccatttcagcgccggaagtggcggtaaaaaacgcaaggcgttcaggatttcatcaccacggaaggtgttaaaaaaataaaaactcacaacattcacaacactgctttacacagaggaagacatacaatgagggtaaaacaatttcgtcgtgctgccgttctaagtgcgagtttgctttccgtaaatgcttttgccgctgaaactgtttctattccggtcgttaaaatggacccggcgctgcacgccaaattgcctgccgatattcagaaatctggcatcatgacctccgtgaacaacggttcttttcctccctacgaaatcgtgaccggcaccgattcgctggacggggcgagtgccgacctggcgacctcgatgggccagctgttggggtaaaggttgagcacgcttcggtcagtggattatcaggtattttgaccggtatctcttccggccgctatcagctgggcattggccctatcggtgattaccctgagcgtcaggccaaaaatgacttcgtcgacttcgtcaaagagtacgtcgcgttcgccgttcctaacggcaatcctaaaaatatccagtcattgagcgatacctgcggtctgcgtattgccgttatggcggcggggtcggctgagaaggtgattaagcagcagtccgaagactgtgtaaaagcgggcaaaccggccgtcaccgtgcagtcgtttaccgaccagccgacctctattcttgccgtgcgctctaagcgctctgacgccttcttctcttcgcaggcgccgctcacttacttcatcaaagcgtctaacggtcagctcacgctggcaggtgccggtaaatccaacggttttaacgacatttatcagggcaccgtggttcctaaagattctgaaatcggcaaggtggttctggccgcctatcaggagctgtttgataacggcacctacgcgattatcatgaaaaaatggggtctcgaaggcaacatgctaacagcacctggcatcaacctgggaaaaccaactaaatgaccgagaaaacgtcccccgatccacgacgcaacgtcgagtttgcacacgcgccgcgtaactacggacgttggatcgcctggataattgtcctgatcctcgccgctgatgtggtcattagcgtagcccgtaacccaaactttgagtggcacgtcgtggcgcagtggtttaccgaggcctcggtcattcgcggtctgggcgtcacgctgggtctcaccgtggtctcgatgctgctgggtacgctgctcggactgctgctggcggtgggccgtttgtcgcaaagcatgctgttgcgccgcctttctggcctctacgtctggttctttcgtggtacgccgctgctggtgcaactgctgttttggtacaatatgtctacgctgttcccgcacgtcgccatgggtctgccgtttattggcccgagctttgcgacctggaataccaatgacctgatcaccccactgaccgccgctatcgccggtttggcgctcaacgaagcggcctacatggctgagatcatccgcgccggtttgttgtccgtggataatggtcaggctgaaaccgcccaggcgtttggtatgagtcggggtcgcgcgctgcgccgcattattattccacaggccatgcgttcgattattccgcctaccggcaaccagttgatcagcatgataaaagcgacctcgctggtgagcgttatcgcgatgggtgacctgctgtattcggtgcagactatctataaccgcaccttcgaagtggtgccgatgctgatggtcgcggttatctggtatctcttgataacttcgattctgaatgttggacagtcggcgattgaacgcttctattcgaaagggacgcgccgtacggtggccgccaaacgtcggcagccgaatgcgcagggcaaagcgttgatagcccagccaaatctcgctcagaaggaggacgtatgagtcaggttctgtcagacagtcagccgctgctggttaccgcccgcaacgtgcataaaagctatggcgacaacgaggtgttaaagggcatcgatctcgacgtgaagccgagtgaagtggtggtcattcttggtccttcaggttcggggaaatcgacctttctccgctgtatcaatcacctggaagatatcgaccgcggcactatcatggtcggcggtgagcagattggctacgagctgcacggcaatcagctgcgtaaactgtcggaaagggggattgcacgccagcgtcgtgatatcggcatggtgttccagcagttcaatctttatcctcacatgaccgtactgcaaaacatcatcgaggcaccgataggcgtgcaccggcagagtcgtcacgaggccgaggcttatgcgcgcgcgctgttggaaaaagtcggcttaagcgacaaggccgatgcctatccgcgccatctttccggtggccagcagcagcgggtggcgatagcccgtgctctggcgatcaagccaaagctgatgctctttgacgagccgacctcggcgcttgacccggagctggtgggcgaggtgttggcaacgatgcgcagcctggcggatcagggctcaccatgattgtggtgacccacgagattggttttgcgcgtgaagcggccgacagggtggtatttatggacggcggttacgtcatcgaggaagggccgccggaagaagtcttggtcaatccgcagcacccacgttttcaggccttcctgagccgttttatttaacgagctgaaatagaaggggatggcgctgaaggacatcatcgatgtatttcggctcatccccttggttgttgtaagactgttggtttctcgttaaagagagcacgcaaggtttgtttccagaggcgtcccgggcgtataatcccccacaatttatgtatgctccctttgtaaaaaacaatttataaagcgaagaaatgctttaacgcgcgggcttacaggctcataatggcgcttatggttataatgcgtacagagacaaaattcaggtcgcccactgcgacgattttattctccagctgtttaattcagcaatcagtgtaaagaaggtatttatggaaggtttgagtattactaaactgttagttgtcggcgtgctgattgtgctgcttttcggtaccagcaaacttcgttcactcggtggtgatctgggcgctgcgctgagaggcttcaaaaaggccatgaatgacgatccggctccggtagcgaaagctgacgcacaggctgaacagcgcgtagagcacaaagactaattcattcgtgaatgaatctgataaaaaaaagctgcttaattaagcagctttttttatatctggcggttgaagtcggacccgggactgtcgggttacttaacttcaatccccttggcctgaagatcggcgtggtatgacgaacgcacgaaaggaccgcaggctgcgtgggtgaagcccatcttcaacgcttcttccttcatgtattcaaattcttcagggctaacgtaacgttgtaccggcagatggtgacggcttggctgtaggtactggcccagcgtcagcatggttacgccgtgacggcgcaggtcgcgcatcacttcaagaatttcttcgttggtttcacccagacctaccatcagacccgatttggtcggcacctcagggtgcgcttccttaaagcgttcaagcagctttaatgaccactcgtagtttgcgcccggacgaacctggcggtaaacgcgcgggacgttttccaggttgtggttgaacacgtcgggtggcgtcgcattgaggatttccaacgcgcggtccatacgtccacggaagtcgggaaccagcgtttcaattttaatagtcgggtttttctcgcggatggcgctgatgcagtcggcaaagtgctgagcaccgccgtcgcgcaggtcatcgcggtcaaccgaggtaatcaccacataacgcagacccatatcggcaatggtctgtgccagcttttccggctcgttgacgtctggcgcaaccggacgtccgtgtgcaacgtcgcagaacgggcagcgacgggtacagatggcaccgaggatcatgaaggtggccgtaccgtggttaaaacactctgaaaggttagggcaggcggcttcttcacaaacagagtgcaggccgtttttgcgcagtgcggctttaatgccctgaatacgagaggagtcagcaggaagtttgattttcatccaggccggcttgcggagcatttcctgccggtctgtgaccacggttttcaccgggattaacgccatcttatcagcatcgcggtatttgacgccgcgttccatttggatcggtttactcataatcgtgcagtttccagtatcgtctctcgcgggcgagatttttcatgacattcaatgaactaactgcttcattaaaaaaataattgaaattatgcagaaattatatcattgaagtgagatagcttaaagtaacgacaacttgctctgttataaaaatgtaaaatttcgcctctgtgggctatcgatttaacgtcggtacgggataatcttccagctgccaagggtgataatcaacctgatgatagcctagctgtttgttaaaagatttaactaaaaccggcataacctgctcaacggtgatacccggcttgactcgactcgcctgggtcatctccagaccggcataaccgcagggattgatgcgcagaaaaggttctaaatccatatcgatattcagcgccagcccgtgcagcgaacagccacggcggatgcgcagtcccagcgagcagattttcttgccgtcaacgtagacgccgggcgcatcggcgcgcggataggcttcgatatcgaaaaacgccagcgtatcgaccacggtttgctctatggcggtcaccagttcacgcacgcccattttacggcgcttgatatcgaccatcacgtacatcacctgctggcccggcccatgataggtcacctgaccgccgcgatcgctctgaatgaccggaatatcgcccggaaaaagcacgtgttcggctttaccggcctggccctgagtaaagacctttgggtgttcgaccagccagatttcgtcctgagtttcgggagtgcgtaaatcggtgaagatgtgcatggcacgggagacgggttcgtagggttgcaggccaagctggcgcagggtgatgcggtcttgcagtttttctcgttgcacggcagttatcgtcattctgagaatagggcaatataaagaaaatcagcgtaacacattacgcgttacgctgatatttgcttggcttacagaaccatacgcacgatttcgaggttacctagctcatcgtacagggtttcgacctgatcgatatgagttgcggtaatggtaatcgaaacggaatggtagttgcctttgctgcttggtttcacctgcgggttgtaatcgccaggcgcgtgacgctgcacgacttccacaacctggtcaaccaactcgggctgcgccagacccatcactttataagtgaatgagcaggggaattcgagtagttcgttcagtttggttttcatgtgcactcccgcgtagtaactgctattaagatgtataaaccataactcccgccgcagcgggagttataactagaattatatactaaacatgtggggttaaagtgcacattttcaacccctgtcgcggtgttttagccaaaccaatgatggaacatcagtttaatatagtccacgatgcggctgacgaatccgccttcttttacttcgtttagcaccacaagaggacgctgatcgatagttttgccgtccagttggaagttaatcgtgccaactacctgatttttctgcaatggtgcatgcagctcggtgttgttcagcacgtagctggctttcagatctttcatgcggccgcgtgggatggtcaggtaggcatctttatcaacgcccagctcaacgcggtcggtgttaccaaaccagacaggctctgacgcaaattctttaccggctttcagcggtgccacggtttcgaagaaacggaagcccaggtcagcagttttttactttcaacttcacgacctttataggtgtgaccgcccatgaaggcggagatcaaacgcatctggccttcggtggcagaggcaaccaggttatagcccgccgattcggtgtgaccggtcttgatgccgtcaacctgcaggctagagtcccacagcaggccgttacggttcatctggcggatattgttgaaggtaaactctttctctttgtaggttgcatactcttctggaacgtcgcggatcagcgcttgaccgatcagcgccatgtcgcgcgccgagctgtattgaccgtctgcgtcgaggccgtgcacggtgccgaagtgggtgtttttcaggcccagcgcatttacgtagttgttcatcagacccacgaaggcgtcctgactgccggcgacgtagtcagccatggcgacgcaggcgtcgttacccgattgcaaaatgataccgcggttcagctcagagacagggacgcggtcgccgggcttgaggaacatcagggatgagcctttgaagaccgggtttccggttgcccaggcgtctttaccgacggtaacgacgtcagtcggggtaattttacctgacttgatggcttgcccaatcacgtagctggtcatcattttagtcagactggccggatcgcgacgcgcatcggcgttcatttcagccagcactttgcccgagttgtaatcaatcagaacataggcttcggcatcaatttgcggaacgccagggatcatggtcttcagattgacatcgtcagcaaaaacggcggacgttgaacagaaagtaatgacggtgccaagcgcgatgcccttgactaaacgagaaggagtagcaagtttcatgattgagacaacaacatccgtataggtaaattaaaaacgtgccacactatatcagaaccgtaacaatcagacatcttccaatacgatggcttgcggggatttaccgatttttacaacatgttaccccgcctgattgtgggcgctgtcgcagcgttggccgtaggggttaacacgaatcactgacttgcatcagctcagcgaattaacgcacttgccagcctgcggcagcgcccatgacctcgcggggcgcgttgactacgattacatcgcagacgccgatactacaaacgactgctgctgcgcttcactcgacagtcgctgttgcagttgtacggcctgctggcggctgctgaatggccccaactgtacgcggtaattgctgccgttaggctgcacttttccaggtacggcgaagcgtttgctcaggctcttctgccagatttctgcgttttgcggattgctcagcgcgcccacctgcaccatgtatccacccccggataccggcgcagactgatgggtagccggacgagcaaccactggcgcggcaaccaccgggcggcggcggccatcgcggtgcgagaggtgtttgcgctggcaaccggtgcatcatcatccgctgcaacgggtgcaggttcgctggtctcaagcacgcccgcaggtaaaggcttcggagcctgaaggaaaccgccgccgttagaggcgcttgcgcccgctcccgcgctatcctcaccgctggttgaatcatcgttctgggtgttcagcgtgctgttgtcgacgggacggacggcggcaccgatggctggtggcgcggacaggactggcgtgcccatgtcgcttgagccgaggctagggcgtgcgggcagggcgtaggtctgtctggcaacggtggtaccaatggtgcccgggccagacagcgtgccgtccggcgcgacgttaatgatgtcgagcttaacgcgggtgctgttggtcaggttaaggcgatcgaaggccgctttagacaaatcgataatcttgtcagaggtgaacggaccgcggtcattaatacggactaccagcatgcggccattggacaagttggtcacgcgcacgtagcttgggatcggcagcgtcgggtgagccgcagtcattgccgaaggatcgaactcttcgccgctggcggtaacgttgctaccggcttcgttgccgtaccaggtcgcggtaccggtctgcgtaaagcgagacgcatcgcgaatgattttgtagctgttgccgttggcgctgtagtcgttgttggcattcgcattcagaggctcatagaccggataggcaccgccaatctcgactaccggcccattataggcgggctctggcgcggcctgctgcggttggttgtctggagaactacaggcactcaataacagcccggcgataatcgcccctacccactccttgcgcattgctcacccctataaattttttgataacatttttcgatgagtatgtatcgacatgacgataccaaacccagccatcagcacgattagcgctgaaccaccataactgaccagaggtaaaggaacccctactaccggcactataccactcaccatgccaatgtttacaaagacatagacaaagaatattagcattaaccctcccgacataacgcggccgaaagtagtttgcgcttttgcggcaattaccagcccacgggtgatcaggcccagatagagcgccagcagcaccaggacgccctgcaggcccagttcctcggccaataccgcgaagataaagtcggtgtggcgctcgggcaagaattcaagctgtgactgagtgccgtgcagccagcctttgccggagaaaccgccagaaccgatggcaatcttggactgaataatgtgataaccggccccgagcgggtcactttccgggttaagcagcatcatcacgcggtctcgctgatagtcgtgcatcaggaagaaccacaggataggaataaaggctgccaccagcacggccgcgcaggcaataagcttccagctcatgccggagaggaaaagcacaaagatgccggaggcggcaatcaggattgcggttccgaggtccggctgtgcggcgaccagcaaggtgggaacaaacaccagcaccaacgcaatggcagtatttttcaacgaaggcgggcagatatcgcggttaataaagcgtgccaccatcagcggtacggcaattttcgccagctccgagggctggaaacgtacgaagcccagatcgagccagcgctgggcgcctttactgacctgtccaaacacgtctaccaataccagcaggaaaatacagaagatgtagatatagggcgcccagctttcatacacgcggggggaacctgcgccagcaccagcatgataaccagtcctccggcaatctgcgcgagtttgcgctccatcataccgacgtcctgaccgctcgcgctccagataacgaacgcgctatagaccagcaacgccagtacgataagcagcatagtgatgtcgatgtgcatcttggtccacagcgaccctttctgttggctctcagtcattctacgttaatcaccttcaatgccgggcggagcaggcgcttcgtccggtaattttgtcgtattgtcgcccaataagatatggtcgaggatctggcggacgatggtcccacggcggggccgataccgccgttttccaacactacgttgactgcaacggtagggttgtcgtaaggcgcaaaggcgttcatcagcttgtggtcacgcagatgctctgcaattttatgtgcattataggtttcattggctttgaggccgtaaacctgggcagtaccggatttcgccgcggctttatacggcgcatccataaagtatttacgtgcggtcccgttcgaacggtttgctacgccaaacatgccgtctttcgccagctcccaatacccggaatggatatcgccaatctgcgtcgtttcctgctgttggtacggcaccttggtggcaccgtcctgtgtgttgagcagcaggtgaggcgttttgacgttgccgtcgttaatcagcgtggttagcgccttcatgttctgaatcggtgtcgcggtccagtagccttgtccgatccctaccgggatggtgtcaccctgataccacggctttttaaagcgtttcatcttccagtcgcgcgtcggcatgttgccattacgctcttccgagagatcgatgccggtatactggccgtagccaaatttcgacatccactctgacagacggtcgatgcccatatcgtaggccacctgatagaagaaggtatccgccgactcctcaagggcttttgtcacattcaatcgaccgtgaccccagtgtttccagtctcgataacgcttatccgagccgggaagttgccaccatccggggtcaaacagcgacgtatttttggtaatcacgcccgcggtcagcgatgaaacggcgatgtacggtttgaccgtcgaggcgggaggatacacccctgcgtcgcgcggttgatgagcggccgatcgggatcgttgagcaaggtgttgtaatccttgctggaaattccgtctacaaacagattcggatcgtagcttgggttggaaacaagcgcccgaatgctgccatcgcgcggatctgtgaccactacggcggcgcggctgccgctcagcagctgttcaatatagatttgcagcgggagatcgagcgtaagcgtaatgtctttgccggcctgaggcggctcttcgtgtagctgacggataactctgccacggttgttgacttcaacttcggcgtagcccgttttgccgtgtagcgtgctttcgtagtaacgctcaatgcccagcttgccgatgtcgtgcgtcgcggcgtagttagcaagaataccgtctttgtccagcctttcaacgtcgcgatcgttaatttttgaaacataaccaatcacgtgtgtcagcgcggaaccgtaagggtaatagcggcgctgatagcctttgacttcaacgccggggaatttgaattggttgaccgcaaaacgcgccacctgcacctcggttaatcccacttttaccggaatagaggtgaagcgtcgcgcacgtttgcgttctttgtagaagttttcaatatcttcagaggtgagatcgacaatcgtcgtcaacgcaatcagcgtatttttaacgtcgtcgaccttctctggcatcatttccagctgatagatggtgcgattaagcgccagcggggtgccatttcggtcgtagataattccacgactcggtgcaatgggaatgagcttgatgcggttatcgttcgatcgggtttgataatcctgaaaacgcaccacctggatagtgtatagattgtaaaccagtatgctgctaagcagcagaatgccaaaaagcgccaccagtgcacggcgcacaaagagggctgattcagccgaatagtcgcgaaaaggattacggtctattttcatcccactacttaatccactgtgctgctgatattgacctaccgattattcgcggtggtacggatgattagtggtaatactccaggcacgataaaggctttcggccaccagaacccgaaccagcgggtgtggtagcgtcagcggagagagcgaccagctctgaaccgcagcctccttgcatgccggtgccagcccttcaggaccgccgatgagcaaactgacatctctgccgtcctgcttccagcgctcaagctgttgggccaactgcggggtctcccagggggttcccggaatatccagcgtaacaatacgattgccttttccaaccaccgacagcatctgttcgccttctttttcaagaatgcgtttgatatctgcgtttttcccgcgtttacccgcggggacttcaatcaactcaaacggcatgtcttttgggaaacggcggagataatccgtgaagccagtctgcacccaatcgggcattttcgtacctacggcgacgagttgcagcttcactcattaaccccagagtttctcgagttcgtacagcacgcggctttcttcctgcatgacgtgaacgatcacttcaccgaggtcaacaacaacccagtcagcttcgttaatgcctttgatgccgtgagcttcaaggcctgctgccttggcttcttcaaccaggtgaccggcgatggaaacaacgtgacggctagaggtgccggtgcagatgaccatgcagtcggtgatgcttgatttgccagcaacgtcgatagcaacgatgtcttgggctttgaggtcatcaactttgtcgatgacgaattcttggagcgctttaccttgcaaagattccccctggggattgagtagtctggaaccgaaaattaagcggcggagtataacacgcgttgtctacgcgcggtacaacccctgtgattcgatatagcgctcaacggagaagggaagtaaatctgagcaatcgcggccctcgtggcggcgctgacggatttcggtagccgaaatatccagcagcggcgtgttggcctgataaatatagccttgaggacgttgcctgagctgaccggcatcttctgtcttgtgcgcatcgtaccaacgctgtaactcgggcgtgtccagctcgctgccatatcccgggcgggctaaaaccaccagatgacacacgtcgagtaaagactcccagcggtgccatttgtaaagcgttagtaatgaatcttggccaataataaacgccaaaggctgttgagtgccacgttctttacgtaacgttgcaagagtctcaatagtgtaggagggcgtatcgcgctgaagttcacgagagtccactgaaaacaatgggttaccttcaactgccaactgggccattttgagtcgctgagacggcgtggcctctggctgtgggcggtgcggcggcacattgttcggcagaagaatcactttctcaagctggatctcgtgggccaattgttcaacgggacgcaaatgaccgtaatgaatcgggtcaaaggtgccgccgaacagtgccatcaggtcgtgttcatcgtgcgtggctggggtcattacaaggttcctgaatcaataaagctgggcggaaggggtttcccgcacagcagcattgaaaggctttccagttcgggccataccgattgaccatagtcctgttttaggcggatttccatctgcgtcaacagctttactgcctgattcagctgggcaagcgaaagacgctgtagcgcctgcgtaaccagcgcccgacggttttgccacactttgtactggtcgaacaggttgcgcagcggctgctggtccatcttgcggcgcagattgaggagcatcagcagctcacgttgcaaagtgcgcagcagaatcaccggttcgctgtcttcctgctgcagttggcgcaggatgtgccaggcacgtttgcttcttccggccaaaatagcatcgagccaatggtaaggcgtaaagtgtgccgcatcattaacggcgtcttctacgcgtggcagcgtcagttttccgtcgggatagagcagggcaagcctttcgagcgactgggccagcgcgagcaggttaccctcatagcagtaacacagcagctgattggcggggtcatctaattcgagcgacagcgctttggcgcgtttggcaacccagcgcggcagttgagcctgctcgggcgtctggcaggtgacaaataccgtgcggtcgctcagtgccttgaaccaggccgcattttcctgcgccttggtgagcttgctggcgcgcagaatcagtaaaatatcgtcgtgcagcaggctgaccagcgtcttgagctgctctgccattggcgcagaggggccgttttcgggaaggtgcagtgtcagggtctggcgactggcgaacagactcagcgcctggcaactgctgaatatgctgtcccactcggtgtgggcatcaagaataaagctaaagtgttcgttgaattgtgctgcatttgcggcctgacgcacggcgtcctggctttcctgcaacagcagcggatcgttaccgcataataaataacaagcgcgcagcccctctcggagctgcgcggcaagttgttcaggatagacacgagtcatagctagtaagtactggccgcaggggctttcccgacgctaatgatttctggtgtaccgtctaccacatcttttttggtcaactctgaggcgtgtacggtcagcagtttacgaatcagctgctgagcggcctgttcacgcatctctttgtcgataatgtcctgctcggcatcttttgctaacgctgccaatgggttatcgaagaaggagcggaacacggtcacgctgatagggtaaatatctttacccggcatcaggacctgcgcacgcacagtcatttctttctggtattcggcagtcttgccgtcctggaagatagaggccgtcgcctggctctccgttgcgccaactatacgcagctcggggaggcttttcttgttggaaaccgtgggttccactacggtgacatcgctcagttttaactggctgcgaatttcacgcgtgagcggaccgtaagggtcatagctgttgagggtaatggttttcaaatcgctcggcacgttggtcgtgccacgcagatgaaaaccacagcccgaagtcaccagaacaatcgcgcctaacaacagcatcaaaatacgatttcgcataatattttctcgcaaaaaaagcctccttgaatcaaccgactaccaggttaagcagcttgcctggcacgtagattaccttgcgaactgtaaccccatccagatattttgcgaccagatattcttgcgccgctaattcgcgaacctgctcttctgtcgcgtctgcggcaacggttattttggcacgtactttaccatttacctgtaccactaccagcttagagtcttcgaccatggctttttcatctgccaccggccaaggcgcggtatcgacatcaccttcgccgcccagtgtctgccacaggctgaagcacacgtgcggagtgaacggatacagcatgcgaaccacggccagcagagcttcctgtagcagtgcgcgatcctggtcggtgtcctgaggtgcacgacccatcttgttcatcagctccataatcgccgcgattgcggtgttaaaggtctgacgacggccgatatcatcggtcactttagcgatagttttgtgcaggtcgcggcgaagatctttctgctcagcagaaagggtcgcaacgtccagcgcaggcgcagcgcctttttcactgtgctcataggccagtttccagacacgtttcaggaagcggtttgccccttcaacgccggattcctgccattcgagggtcatttctgccggagaagcgaacatcatgaacagacgcacggtgtcagcaccgtatttctgcaccatgacctgcgggtcgatgccgttgtttttggacttggacatcttgctcatgcccgcatacaccagctcgcgaccttcagggtcggtggctttcacgatgcggcctttctcatcacgctcaagggtggcatcgattggggaaacccaaacgcgtgcgccaccctcgttcaggtagtagaaggcgtcagccagcaccataccctgacacagcaggcgttttgctggttcatctgaggtgaccagacccgcgtcgcgcatcagtttgtggaagaagcggaagtacatcaggtgcatgatggcgtgttcgataccgccaacatattggtctaccggcagccagtagttggccgcagcgggatccagcatgcctttatcgtagtccgggcaggtgtaacgcgcgtagtaccaggacgactccatgaaggtatcgaaggtgtcggtttcacgcaggccagggatgccattaacggtggtttttgcccactcaggatcggccttgattgggctggtgatgccgtccatgacgacgtcttccggcagaaccaccggcagttgatcttcaggcgttggaatgacggtaccgtcttccagcgtgatcatcgggattggcgcaccccagtaacgctggcgtgatacaccccagtcgcgcagacggtagttaactttacgctcaccgacgcccaggctcaccagtttgtcagcgatggcgttgaagccttgctcgtgatttagaccgtcgaactcgccggagttgcaaagtacgcctttctcggtcatgacttcggactggacgtcaggcacgctgccgtcggcgttcaggataaccgcttcaattggcaggttatatttagtggcgaattcccagtcgcgggcatcgtggccaggaacggccattaccgcaccggtgccgtattccatcagaacgaagttggcgacccagattgggatttttttgccgttcaacggatgaatcgcgaacaggccggtcggcatgcctttcttctccatggtcgccatttctgcttcggctaccttggtgttgcggcattcgtcgataaagtcggccagcgcaggctgtgaagcggctgcctgcagtgacagtgggtgacccgcagccacggcggcgtaggttgccccatgaaggtgtctggacgcgtggtgtaaaccgtcagtttctcttcgctgttttcaacgtcgaaggttatttcgacgccttcagagcggccaatccagttacgctgcatggtcttgacctgctcaggccagctctcgagggtatcgaggtcgttcagcagctgatcggcgtaggcagtgattttaatgaaccattgtgggatctctttacgctcaaccttggtatcgcagcgccagcagcagccgtcgataacctgttcgttagccagaacggtcaagtcctgcggacaccagttcaccgctgaggtttttttgtaaaccagacctttctcgtagagcttggtgaagaaccattgttcccagcgatagtattcaggctgacaggtcgcgagctcgcggtcccagtcatagccgaagcccagcagtttaagctggttcttcatgtattcgatgttttcgtaagtccatggcgccggcgcggtgttgtttttaaccgcggcaccttcagcgggcagaccaaacgcatcccagccgatcggctgtagaacgtttttaccgagcatacgctgatagcgggaaatcacgtcaccgatggtgtagttacgaacgtgacccatgtgtagacggcctgatggataaggcaacatggagaggcagtaatacttctcttttcccggttcttcggtaactttgaaggtttgcttctcttgccagtgaagttgaacctgtgactctatatcttctggacggtattgctcttgcatggcggccgatggtcctgtgagtgaaaaacagctacatccgtagccctatttcgttaatcaaatatcaaatgatgcgttaataacaaaactttcaaacagatccgcatagcatagctgataagcggcaagggcaacaacaccaagcgtggcaccagaggctttttatgctgatctatgggggtttatttttcggacaaagcggaaactgtgggctgcatccgaccgagtcagagattcacgactaaaataggcagaagggccataaagcgaaagctttgttttttgaatgtaatttgttcaacgaaagcaaactgttttaggcgtttaagtcgcactttaaggagcaactatgacaaatgaacagcaggactatcgccaattaatggcttcattgacggagcgcctgcgcggcggtgaacgcgatatcgatttgctggtgcgcgatgcgcgagaaagccttaaacaagaaggcaacctgtcggtaaacgaaatagacagactgactatctcggcaaggcgtgacttgcaggaatttgcccgcatttacggtgaatacgcgccgtcgcacagaatcgcccctaagcctacgtcggaagcgccggaagaagaagacagcgtgttcatgcgcgttattaaggaaagcctgtggcgcgagcttgcggatatcaccgacaaaacccaacttgagtggaaagaggtgtttaaagacgtaaaccatcacggtgtttatcacagcggagaagtggtcgggttgggggatcttatctgcgagaaatgccattttcatctcgccgtttacacgccggagattctgagcaaatgcccggagtgcgggaatgacgagttttcccgcaggccgttcgaaccttaatcttgcagcggcagctgccccagctcaccccagtcaatgactcctgtaagcgactggggatttacagggtaattcgcttcctctttgaggcttaccccttagggtccgctgccttgccgcagtgccgatgaatttggaaattagtgcaggattttggctaagaaatctctcgcacgctcagactcgggattattgaagaagtcgtctttattgcgatcctccacaatcttgccctcatccataaagataacccggttcgccaccttacgggcaaagcccatctcgtgggtcacgaccatcatggtcatgccttcgttggcgagctcgaccatcacgtcgagcacttcattgatcatctccgggtcaagcgccgaggtcggttcgtcaaacagcattgcaatagggtccatgcacagtgcgcgcgcgatggcgacacgttgctgctgtccgccggaaagctggcccggaaatttattggcgtgcgcagagagcccaacgcggtcgagcagcttgaggcctttatcgcgtgcggcggccttgtcacgcttgagcactttgacctgtgccagggtcaggttttcaacgatagacagatgcgggaacagctcgaaatgctggaacaccatgccgactttggaacgcagctgcgccagattggtttttttgtcattcacgggcgtaccgttaacgagaatctggcctttctggatgggttccaggccgttaacggttttgatcagcgtcgacttacctgagcctgaagggccgcagactacgaccacttcccctttcttaacttcggtactgcattcggtcaatacctggaaatgaccgtaccacttggagacatttttcagcgaaatcatgaaagggtccttttcttcaagaagctcaccagcaatgaggcagagaggctgatgacaaaatagacaaaaccggcaaacaggatcatctcgacctgtgttccgtcacgctcgccaatgttggttgccgtacggaagaagtccgcaagactgagcacgtacaccagagaggtatcctgaaataacacgatcgcctgcgttagcagcagcggcaccatggcgcggaaggcctgtggcaaaatgatcagctgcatcgactgccaatgggtcataccgagcgccagcgcggcggaggactgcccacgggcaatactttgaataccggcgcggatgatctccgagtaataggccgcttcaaacagcgcaaaggcgaccatcgcagaaatcagacggatatcggtcttcggcgacagaccgagcacctgttgcaggaaacttggcaccaccagataaaaccacagcagcaccatgaccagcggcacggcgcggaacatgttgacgtaaattcgggcaaaccagctgatcggtttgaacgacgacaggcgcatgacagccagcagggttccccaaagaataccgaatacgatagcgatagcggttatcttcagcgtaatgaccatgccgcttatcaggtagggcaggctgggaacaatcgaactccagtcaaattgatacatgaattatttgctccccagattgcccggcaggcgaatcttgcgttcaacctgttgcatgataagcatgatgaccgcgttgatgagaacataagccagcgtgatggcggtaaaggactcataggcgtgagccgaatagtcgagcagtttgccggcctgtgcggccatgtcgaccaggccgatagtcgaggctattgccgagtttttgaccagattaagcatctcggaggtcagcggcggcacgataacgcgataggcattgggcagcagcacgtagcgataggtctgcggcagggtcaaccccatcgctagtccggcggctttctgaccgcgcggcagtgactggatggccgcacggacctgttcgcagacgcgcgcggcggtaaacaaccccaaacagaccatcgacgaaacaaagaactgcacgttagggtcaagatcctgcttgaaccacatgccgatgttctcgggcagcagttcaggcaccaccagataccagataaagaattgcacaatcagcgggacattacggaaaagttccacgtagcaggtgccgagtgcagacaggaagcggttaggcacggtacgcagaatgccgaatactgaaccgacgaggaatgcgatgatccaggcgcagattgacagcgccacggtgacctgaaaaccagaccagatccagccgagataagtggtgttaccgaaggggcctgttcgagaaaaatgccccaattccaaccagaagacatagcgtactccattaattgccgtgcaagtgatgacgtgaacagtctggatttgtgggtgtaaagaatggcggggtggggaacgaccaccccgcattctccctgctatgttgcaggttcctgtgcccctgtcaggacatcatcaccttccctttgcccctgtagctacgaagctgcagcatcaaaggcttcggggatacttcagtgtttagtgactttacgtatttaattaaagcgccttatcgtttggcgttttgaacagggctttcatgtcgtcagacaattcaaagttcatgttcagattctttggtggaataggctgtttgaaccaggtgtcgaaccatttagcggcctggcctgaggtctctgcctgcacgatggtgtcatcaaccagtttcttgaattcagggtcatctttacgcaacatacagccgtaggcttctttagactgcggagtgccgagaatgacccagtcattcgggtttttggctttggcgcgctcgcctgccagcagggcgtcatcaagcataaatgcagcagcacggccagtttccagtgtacggaaggagtcaccgtggtctttagtactgatgattttcagacccagctttttctcgtcgttcagtttgttgagcagcacttcagaggtcgtccctgaagtaacgaccacagttttacccttcagatcgtcgaagtctttaatcggcgagcctttcttaaccagaagacgggtaccgataacgaagatggtgtcagagaacgccgcctgctgctgacgttcgaggttgttggtggtggacccacactcgaagtcgtaggtgccgttttgcagcagcggaatgcggttttgcgaggtgataggcaacattttcacctgaagatttggcgcgttgagcttcttcttaatagcatcaacaatggcgttagagaaatcctgtgaatatcccaccactttctgttcattattgtaataagagaagggaatagaagactcacggtggccgacaacaatcaggccgctgtctttgatttttttcagcgtacccgtcaggtcttcggcgtgggctaggctacttgcggcgacacttgccagcagaactgacaacaccagtttgcgcatttgcatggtccaactcctttgcttagtgatggatccctcaggaaggatcaaagatgaatccgataataaagacttccgttaactcactctcggctgtgctcaatataatcttggcattcagaagataccgtaatgtgaatattgtgaaatcgttatgtttcttttttgagacaacgcgcgcaccaatttcaagcaacaatggcctgttgcaccggtatggtgaccagtttttgcacgaaatgtgtcaaaacgatgcaaggcgcgactataagtttataaataagatatctttcaacaagatgtagcaagatgcatgccaactgaacttattagtcgaatttatgaacgaatagcgaaggtaagtgaaaagaatagaacggcgaaaacggcgaccaggcaggaagtaaaaagagaccactaagaatagggttgcactgaaaacaggcagaggcacccttaagtgcctctgcataatgacaataacttacgccttgcggcggcttaacaggatacttgcaacggcaaacagcagggtcaggatccacaccggccagcttcccatgcgggcataaggcgtaacaccggcggttggcgtgacttttacttccagcacctgacgggtgaactgcgggatctcggcgataatattgccctcggcatcaacggcggcagtaacaccgttattggtgctgcgcagcagaggacggccaagctcgacggcgcgcatgcgtgccatctggaaatgctgccacggcccgatcgagtgtccaaaccacgcgtcgtttgaaacggtcagcagcaggttggtatcaggatggaagttctcccgcacctgttcgccttcgacaatttcatagcaaattgcggtggtgaaattcagaccggcaacgtgcagcggtggctgaatatagttaccgcgactaaatgatgacatcggcaaatcgaagaacggggctaaaggacgcagcaggtcttccataggtacaaactcaccgaatggcaccagatgatatttgttgtagcgattgggatcgggataacgataaggctcaggctcacccagagcgatcacgctgttataagtcttggcaccggtttcggtacgctgataatcaacgatgccggtgatcagatgactgtgatgtgcgcgtgaaaggtcatccatcatggtcagaaactgctgctgatcggattcgatatccgggatagccgactctggccagatgatgattttcgccttgccgaggtaaggacgcgtctcgtcgagataggcctgtagcgttgagataagcgctttcgggtcccacttcatcgactgcggaatatttccctgaaccatagcaacgtcaacggttttgtccggctgtggcgtgaaccagtgcacctgacgcagaggccaaggcagcagcagcatggccagcgcgatgaccgccggcactttcttacgttgatgcagcgcatacaccagcagaccgctgagcgacatcatcacaaaggtgatgctctcaacgccaccgagcggagcgagccctttcaatggaccattgatctggctgtagccaaactgtagccacgggaagccggtcagtacccaaccgcgtaaaaactcggtaatttgccacagcgcaggtgccgcaagcgccagacgccaccaggtggttttaggccacagcttggcaagtaatgcgccaaacagcagggtatagagtgacagatagacggcgagcagcgccaccaggaagatgttcaccgggcctggcataccgccaaaagtggcgatactgacataaacccagttcacgccgctgccgaacaggcctaatccccaacaaaaacccagcagcgccgactggcccggacggcggtcaagggtaaccgccagcaggccaaacagcgagatgatggccgcaggccaaaagtcataagggagaaggacagcgtgccacaggcaccaaataaaaccgccagcaggcatctcacccgctggcgttggaatatacccgtcatatttcacaccacaaatgcgttggcttcattcccttacccaagcggcttctctgtgtaagcgcctggggatgcgttcctttgccgccttcctgcgacgcgaaatctgacaggtataaaaattttagtgccatgttttaaattaagcttccaatttcggttgcggcgcgtcgtccgggatttttacgtgaacctgaatgatacggcggctatcggccatcgcaactttgaatacgtaaccgtcgatttcgatcgtttcgccgcgggcagggaggtgcccaaaggattgcatgaccagaccgccaatggtgtcgacctcttcatcgctgaagttggtgtcgaatacctcgttgaagtcttcaattggcgcaagtgcacgaacggtataggtatgtcggcttagctgacggatattgagatcttcttcatcatcgtattcgtcttcaatttcgccaacgatcagctcgagaatgtcttcaatggtcaccagaccagagacgccaccaaactcgtcaaccacaatcgccatgtggtaacgctgtgaacggaactctttcagcatgcggtctacgcgcttgctttcaggaacgacaacagcggttctcagcactttatcgatgctgaatggctctgattcggtacgcataaatggcaataagtcttttgccatcagaataccttcaatgtggtccttatcttcactgatgatcgggaatcgtgagtgggctgactcgataatgacgtccaggcactcttcgattggctgattgcgtttaagcgtaatcatctgcgaacgcgggatcatgatgtcacgaacgcgctgctcggcgatatccatcacgccttccagcatgtctcgggtatcggggtcgatcagatcgttttgttcggaatcacggatcagctcaaccaaatcaccacggtttttaggttcaccgtgaaataactggttaagaataagggaaaagaagcccttcttgggactggggctgtcgctgttttgtgggtggtcatcgctcatggcgttgggttggagattctcttgttgataatagtaaaatcattgacgtcagggcgtggcgctagcgtcaatgacatgggtaatgaaaacagagtaatgctttttagtgcgtttcgtcgagtgacactattctttcgactaatgattcatcgaataaatcattcgtcgagcaaaagataagggtcgggatgtccgagagattgcataatctcaatctcgatggcttccatctcttccgcttcttcctcttcgatgtggtcataccctagcagatggaggctaccgtggacaaccatatgggcccagtgcgcatttaacgccttattttgctcgcgggcttcttgttcaacgacctgacggcagatgaccaaatcgccaagcaacggcatttccatgcccggtggtgcttcaaacgggaaagacagcacgttggtcggcttgtctttaccgcgataggtcatgttcagctcatggctttccgcctcgtcaacgatgcggattgtcacttccgactcttcctggaactgaggaagtacggcttccagccactgctggaagtcgctctctgccggcaagccttcgctgctctcgctggcaatctgtaaatctaaaataacctgatgactcatgtattgctctgttcaggggtgggttgggcagcatactgctgtgattcttgcttgcgctgtctggcaacctcgtcacggcgtttctggtcttcttcttcccaggcttcataggcgaccacgatgcgggcaaccaccgggtggcgcacgacgtcttcgctgtggaagaagttaaagctcaactcttcaacgccagaaagcacttcaatggcgtggcgcaggccggatttttggtggcgcggcaggtcaatctgcgtaacgtcgccggtaataaccgccttggagttgaaaccgatacgcgtcaggaacattttcatctgttcaatcgaggtattctggctttcgtccagaatgataaaggcgtcattgagtgtacggccgcgcatgtaggccagcggcgcaacttcaattacgtttcgctcaatcagcttctcgactttctcaaagccgagcatttcgaacagcgcatcatacaggggacgcaggtaagggtcgaccttctggctgagatcgccgggcaggaagcccagtttttcaccggcttcgaccgcggggcgcgtcagtagaatacgacgaacctcttggcgctccagtgcgtcaaccgctgccgcaaccgccagatacgttttacccgtaccggcaggcccgataccaaaggtgatatcgtggtcaagcacgttggcaatatactgtgcctggttcggcgtgcgcggcttaatcatgccgcgcttggtcttaataatgaccgctttaccgtagtccggcacgctctctgcggtttgctccagtacacggctctctttaatggccaggtggattttttcaggatcgatgtcctgaatttcaccgcgcagcggcgccgtgtcgacatacaggtcgcgcaggatatccgcggccgcttcgacgcaaaggtttttacctaccagtttaaaggcgttatcacgacgattgatctcgatgcccaaccggcgctccagttgtttgatgttgtcatcaaacgggccacaaagactcagcagacgctgattgtcttcgggctccagcaaaatctcttgtgttacaacgttcaaactattcctctgggccactcgggacctgttgaaggtgtatttcgatgacgactttataaagtaatcatacatgcccttggcgaaattttcccagcacctcaagtgctgttgatcagaatatgcggcctttctccaaaaaataaagggcgcctgagcgccctttaacgttaatcattgaaaagattagggctgatagagacccacgccgatttcattctctttacgggtgcgtgcaatcaccgactgcggggaggcaatttgacgcagatccatctggtcttcggtacgcaccacgatgccgcgcagggagttggtcagtacgtcgataatctcgacgtctacgaacttgccaatcatgtccggcgtgccttcgaaattgaccacgcggttgttttcggtgcggcctgtcaactccatgatgctcttgcgagacgtgccttccaccagaatgcgttgcacggtgccaatcatggcgcgactaatgcgcagggactgctggagaatgcgttcctgcaattcgtacaggcgctgcttcttctcctcttcgctgacgtcgtcaaccatgtccgccgccggcgtgcccgggcgagcagagtagataaagctgtagctgacgtccatgttgacgtcggcgataagcttcatggtctgcgcgtggtcttccgcggtctcaccagggaagccgacgataaagtcggagctaaaggtgatgccagggcgcgccttgaggattttacgcagcgtggatttatactccagcacggtgtgcgcgcgcttcatcatggtcagcacacggtctgagccgcattgcaccggcagatgcaggaagctcaccagctcaggggtatctttataaacctcgatgatgtcgtcggtaaactcgatagggtggctggtggtgaagcgaatacggtcgatgccgtcgatgctggcgaccaggcgcagcagctcggcgaaggtgcaaatctcaccgtcaaagccaggaccgcgataggcgttaacattctggcccagcaggttaacctcacgcacgccctgtgccgcaagttgggcgatttcgaacagcacgtcgtcgctcgggcggctgacttcttcgccgcgggtgtaaggtactacgcagaagctacagtacttgttgcagccctccatgatggagacaaaggcggtcgggccgtcggcacggggttcaggcaggcggtcgaatttttcgatttcggggaagctgacgtcaacgataggacttttgctgccgcgtacgtggttgatcatttccggcaggcggtgcagcgtttgcgggccgaatacgatgtcgacatagtgggcgcgctggcgaatcagcttgccttcctgcgaggccacgcagccgccgacgccgataataatctcgggtcttttgcgcttgagcagcttccagcggccgagctggtggaagactttctcctgcgccttttccctgattgagcaagtattaagcaacagcacgtcggcctcttcggcattttcagtgagttcgaaaccgtgtgtgctgttaagcaggtcagccattttagatgaatcgtactcgttcatctggcagccccaggttttaatatgcagttttttcttcattgacatgccattactcaaaaagcgttaaacaaaacacccctatactctacttctggagtgaagcctcagagcctattggtcaatagtttgggaatggggtggcgaatagactctgccgtacagccggtgagtgttttttaccgggcggcgtatttctggagaagtattgtaatcccacatcaatcgagtggctagtgcgtcagcgcaggttacggactgatagcaacagaaaaatccggtacacttctcaaaatatctatcgggcgcgtgccttgatttcacgaaaaataacccagtaaacgaagagcagaatgaatactgtcgtgacaaaaatgataaataagtccttcgacgtggtggtggtaggcggtggaatggtcggtgccgcgacggcgctgggtttcgctcagcaagggctgaatgtggcggttattgaagacaaggcgccacagccttttgatgctgccgatcccatcgatctgcgtatttcctccattggctgcgcttccgtgcgcctgctcgagaagcttggcgcatggaaaaacgtcgcaaaaatgcgatttacgccgtatcgccgtctggaaacctgggagcagccggggtcggaggtattgttcgacgcccagtcgctcggtctgcctgaactgggctttatgctcgaaaatcgggtgcttcagctggctctgtggcaggagatgcagctgctggaaaatctgaccctattttgcccagacaagcttaagcaactgaaaaatgcgggcgagggcggatggttgctggagctggttagtggtgaaacgattgatgccaaattggtcgtggccgcagacggggcgaattcattggtgcgtcagcaggctggaattggcattgatggctggcagtatcgccagaactgtatgctgattaacgtcgaaactcagtcgaaggatctggatgtcacctggcagcagttttacccgagcggaccgcgtgcgttcctgccgctgtggggcaaccacgcctcgctcgtttggtacgacagcccgcagcgtatccgccaactacagtcgttaaatatgaaacagctgacccaggagattacggccgcgttcccgccgcgtctcgggacggttcaggcgctctcgtcagggtctttcccgctggtgcgtcgtcacgctcagcgctacgtctcgccggggttggtgttggtcggtgatgcggcgcataccattaatccactggccggtcagggcgtgaatcttggctatcgggacgttgaggcgctgctggacgtggtcgcgcaggcgaatgacaaaggtgaagcctggtggagtgagagggtactgcaacgctatcagcgccgtcgcagagttgacaacctgatgatgcagagcggcatggacctgttctacaccgcgttcagcaacagtctgccgccggtgcgaattcttcgcaatctggccttgatggcggctcagagagcgggcaagctgaaattcatggcgctggaatatgccttaggactgtaaataaaaggcagggaagtgtcgaatctatcaaggcagtggcttcactgccttttttgtgtccgctattgttgatgtccgaaaataaggtcaggcaaaagccaggacgcagaaaagcaaaaagcccgccgaagcgagcttttctaaatttggctggggtgccaggattcgaacctgggtatgctggtatcagaaaccagagccttaccgcttggcgacaccccaatggtgtttactgcataattcttactacgactttgctcataaccattcagactaaaatggtggctacgacgggattcgaacctgtgaccccatcattatgagtgatgtgctctaaccaactgagctacgtagccaatttttaactatctaaattgctattgcaagctgtttttaatcattattttaaaattaaataataaatttcaaacagttaacacgttgaaagtggctggggtacctggattcgaaccagggaatgctggtatcaaaaaccagtgccttaccgcttggcgataccccatcttattactttcaaattgtttttcattttcattgtgctgttcgaagaacaagacagtgaaaaaaatggctggggtacctggattcgaaccagggaatgccggtatcaaaaaccggtgccttaccgcttggcgataccccatccgtgcttaccgagtgaaatggtgcgggaggcgagacttgaactcgcacaccttgcggcgctagaacctaaatctagtgcgtctaccaatttcgccactcccgcaaacaggaaaagaagtggtggctacgacgggattcgaacctgtgaccccatcattatgagtgatgtgctctaaccaactgagctacgtagccgtcttctttctgctcaaccttcatcggcgttgcggggcgcattatgcgtatatggcagttttgcgtcaacaagttttttgccaaaaaagcgtggatgcggtgcatttgggtagcttatgaccactccggcgataaattctacaaaagataggatattcaattaatttaaacataaaaaaacgggcctaaagtggcccgttagcttgaaaaaatgtcacttattgataggcagattcatgcacgcctacggcacggccagaaggatcgttcatggttttgaacgattcatcccactcaacggctttcgctgaagaacaggcgactgtcgggccacccggaacgcattctgctgcgcttggaaccgggaacagctcttcaaagatagtccggtacagatacccctctttcgaggtcggggtgttgtaagggaagcggaaatgcgcagtttcgagctgttggtcggtcacctgctgcgctgccacttcttttaaggtgtcaatccagctgtagcccaccccgtcagagaattgctctttctgacgccacgccacgcttttcggcaaatagtcttcaaaacattcgcgcagaatgtgtttttccattttgccattgccgcacattttgtctttcgggttaacgcgcatcgcgacgtcgaggaattttttgtccaggaaaggcacgcgagcttctacgccccaggctgacatcgccttgttggcgcgcgcacagtcatacatgtgcagagccagcagcttacgcacggtctcttcgtggaattcctgctcgtttggcgctttatggaagtacaggtagccgccaaacacttcatcggcaccttcaccagacagcaccattttgatgcccatcgccttgatcttgcgcgacatcaggtacatcggggtcgacgcacgaatggtggtcacgtcgtaggtttcgatgtgataaatcacgtcacggatagcgtcgagaccttcctgcacggtgaaatgaatttcgtggtgcacggtaccgaggtggttcgccacttcctgtgccgcacgcaggtcgggtgagccctcaagacctaccgcgaaggagtgcagctgtggccaccaggcttcgctttgatctttatcttcaatgcgacgaccggcgaacttcttggttatcgcagagataattgaggagtccagaccgccggacagcagcacgccgtaaggtacgtctgacatcaagtggcttttaaccgactcttccagcgcgtctttcagcgcaaccttgtcagtgacgttgtctttaacgttgtcaaactcgaaccattcacgctgatagtactcaacgatttcgccgtctttgctccacaggtagctgcccgcagggaactctttgatggtgcggcacactggaaccagtgatttcatctctgaagccaggaacatgttgccatgctcatcgtagcccatataaagcgggataatgcccaggtggtcacggccaatcaggtaggcgtctttttcagtgtcataaaggataaaggcgaacattccctgcagttcatcgaggaacgccgggcctttttcctggtaaagcgcgaggatcacttcacagtcggattcggtctggaacgcataacgctcgccaagggaggcacgcagcgcctgatggttgtaaatttcgccgttaactgccagaacgtgagtttgtgcttcgttgtacaggggttgcgcgccgttgttgacgtcaacaatcgacagacgctcgtgacaaagaatcgctttgtcgctggcgtaaacgccggaccagtctggaccacgatggcgcatcaagcgtgacaactcaagcgcctttttgcgcagctcgacggagtcggttttaatgtcgagcacaccaaatatagaacacatataactctccctaacggcttttctctggcggtgatgttatttttcattaccgagttgttgttgggcggcattaccgaattcacaatttatttcggactacgctgcgtctctgataatgaaaatgcgtaaaagcgagagcctttgcaagcaatttagcgattgtttgaaaaatagttggttgaccctctgcgtttcttagcggattgtcatttttaagggggataaattatcgaatcttcaaaaaaaggccgggtgggatagatggggctaaaaatagcgggcgtaaattatcaaataaagaaaaagcgccggtttttaatgaccggcgctggcaaaaaatggctgggggcgcgttagatgacgtcgatatcggctacggaagggtagatccaggtcggtcggaacggcatgttttccacgtcgtttaacgtcgaaacgccgctcagcaccagaatggtttcgagtccggcctggaagccagccagaatatcggtgcgtagattgtcaccgacaatcacggtgtcttcggagtgcgcctgcatcttgttcagcgcggaacggatgatccaggggcttggtttgccgaccacgaacggcttgcggccggtgattttctcaatcggtgcacagagcgcgccgcaggcaggcacaaaaccgtgcccgtggtagtcgggattggtggcaataaaccgtgcgccgttggcgacaaagtaggcggctttgtgcatcatgtcccagttgtacgaccgcgtttcaccgactatcacgaaatcaggattaatatcggtgatcgtaaatccggcgttgtacagctcatggataagcgcgccttcgccaatcacgtaggcttttttaccttcctgacgcttaaggaagtctgcggtggccatagctgaggtgaaaaaggcgctttccggcacgtcgagtcctgcggaagcaaagcgattagcaaggtcttgtgcggtctgagagggtaattggtcaggataaccagcggcattccctgttcctgaacacgtgctaaaaacaggtcggcaccgggcactggcgtattgtcatgcagcagaacgccgtcgatatcacaaattacgtttttaattgtcatagataacctattttttcacgaccagatttttgcatctcaaatgcaacagcaaagccccttcatccctgaagatgccgggaccgtcaaaccagaaactattgggccgaattttccagcagacgctggagcagcacgccgttgagcatcgcgcgtttcaccagcgcaaacgcaccgatggccgaacgatggttcaattctgacgtcacaatcggcaggttgctgcggaaatctttcaatacctgagtattgatgcagctctgcagggcagggagcagcactttatcggcttcggtgatttcaccggcgatgacgactttctgtgggttgaacaggtttatcgcgatggcaatgcttttaccgagatgacggccgacgtattcaatcacctcgcaggcgagctgatcgccacggtttgccgctttgcagatgctgctgatggtgcagtcgtccagcgaaagcttgcttggatagccctgcgtcagcagattgcgcacccgattttcgatagccgagttggccgcgatggtctcgaggcagccaaaattgccgcagtgacaacgttcaccgaggggatcgacctgaatgtggccaatctcgccgacgttgccgttgctgccgaggaagatttgtccgttaaccagaatgccggcaccggttccgcgatgcaaacgaaccaaaatggagtcctggcagtcgcgcgttgcaccgaagtagtgctccgccaacgccagactgcggatgtcatggccgacaaagctggtgacgttgaacttgctttcaagaatgtccaccaaccgccagttgtgaacgctgatatgcggcatgtagcgcacgatgcctttgaccggatcgaccagcccgggcaagatcacggcgatcgcaatcagttcacgaattttgcgctgattgacttccataaaatgggtgatagcggagactagcgcattttcgagcgtctcctgagtgcgttccggcagggataatgctgttcagaaagggccttggcgctcaggtcgtatagcgtgagcgtggcgtcgttgcggcccaaacggaccgccacggtctgaaacgggcgcgtctcggtgataatggagatagcgcgcctgccgccggtcgaggcctgttgatcgacttctttaatcaggccgcgctcgagcagctggcgggaaatcttggtgacactggcgggggcaagctggctcagctcggcgatttgaatgcgcgagatgggtccttgctggtcaatcaggcggtagaccgcagcactatttaactgcttgaccagatcaacgttacctatttgtgactgcccgcctgtgttcatttattgctctctgcgattacacctcatcaccgttgacgagggtttttgttattttgaagtcgtgggtgaacgcggtcaggttggccacttttcccgcttcaatactgcccagtgttccttcaacaccaatggcgcgagccgggtagagcgtggccatacgcagcgcctcgtctaacgcaataccgacatgttctacgctgttttgtactgcctgaatcatcgtcagcgcggaaccactgagggtgccgttttcatccacacaaagtccatcacgatagtatattgttttaccagcaaaaatgaactcttcaatatttgctccggccggagcggtcgcgtcggtgactaataccagcttttcgcccttaagtttcttagcgttacgaatacttggccaggcgacatgatgaccgtctacgataatcccggtgtaaacttctggggtatcaaaaatcgcccccatcaaaccaggctgacggccagagattggcggcatggcgttatacaagtgggtcgcgaagctaataccgtcggcaaagccttcacgcgcctgctcgtagctcgagttggagtgaccggcagagacgacgattcccgcgtcacgcagctgacgtataaatctgccctcaacctgctccggggccagcgtgaccttggtaaccacgtcggcgttggcgcagatgtagtctatcattgcggcatccggtttacggatgaacgccggattgtgggtcccttttttctcaaggctcaggtacggtccttcaagatgcagacccagcgcctgattcgggtacttcgccagatactcgcgcatcaccttgatgccgtgcttcatgaactcgtcactgctggtaattagcgtcggcagatagctggtacagccggatttctcgttggccgcctgcatgatttccagcgtctcaaccgaaatggcttccagtgagtcattgaactgcacgccgccgcagccgttgagctgcaggtcgatgaatccgggggctagtcgggcgccttccagattgcgcgtttctatatccgccggcagtgcgtcaactgggcaaacacagtcgattaccccattagcaatcactaccgcgtggttatccagaatatcgtggccggtatagatccgaccgttaatcaaagcgaacatctcaccccctttccccgtcgtcattggcactgcaacggcgtaagcttcgcgcgtttatccgaatcactgactaggtcagccgatggggattctctcacttgctgcctcgtcgcgcagagccaattatttcacggaactgtctgtaaattttggattaattaaagatctttcatattttcggcttcaagctcacggaagtatttcaccgtttttacttttaattccattgtggatggttcgtcgcaaacgaccactgctttcgcatgcagctgtaggcagctgatggtccacatgtggttgatgttgccttcgaccgcggcttccagagcctgtgccttggcatggccggtcaccagaatcatcacttcttccgcatcgagcagggtacccacgccgacggtcagtgcatattttggcacctgtgaaacatcgttatcaaagaaacgcgaattggcaatgcgtgtatcgtgggtcaacgtcttgatgcgcgtacgcgaagccagtgaggaagccggttcgttaaacgcaatgtgaccgtcgttgcccacgccgcccatgaacagattaattttgccgtaggacttaatttttgcttcgtactgacggcactcttcatcgacgtccggtgcattaccgtttaaaagattaatattttcttttttaatatcaacgtggtcgaagaagtttttgtacatgaacgtatggtagctttccggatgttcctgcggcaggccaacgtactcatccatgttgaaggttaccacgttttggaagctgacttggcctgctttatgcatagcaacaagatgtttataggcttccatcggggtaccccggtcggcagacccagtacaaacggacgttcggcggtggggttaaacgcgttgatgcgttgaacaatatgacgcgcagcccatttacccacttcagtgggagtattcagcggaataagtctcatcgtacacctcttaagttttatactttgtatacccaccgcgagggcgatgggcaaggaatttaaatgttccatgcatgaccggctttgactttacagcgggctcattaacgcagatgatcggcacactgcggcctagatttttttaatgataaaataagttttgggttatgactagcattatggcttgttaatacccatttttggtgataaaaatcacaaataatgaggttttaatttgcgatacgaattaatttttttacactgcgcagtatgactttggtgagtcaggttttgagcattttcaaagataggtagtcacacattctaattaaactactttggtgattcgtctcagggcgaatagggggaaaagttgagtatacttagctacttgcagaagattggccgggccttgatggtcccggttgcgacattacccgccgcagcaatattgatgggggtagggtattggattgacccggtgggctggggcggcgacaacgcgttggcggccctgtttatcaagtcaggatcggcaatcattgaaaacatggcggtactcttcgcgattggcgtggcttacggcatgtccaaagacaaagatggcgcagccgcgctgacgggtttcgtcggttttctggtattaaccacgctgtgttctccggcagcggtctccatgatccaaaaaatcccagtcgctgacgtgcctgcggccttcggcaaaatcaacaaccagtttgtgggtattctcgtcggtatcatttctgcagagctgtataaccgcttcagccacgtagagctgccaaaggcgttgtcgttctttagcggccgtcgtctggtgcctatcctgacctctttcctgatgatcgtcgtggcgttcatcatgatgtacgtctggccgcttatctttaacggtctggtgacctttggtgagcacatccagcaactgggatctgcgggcgcgggcatctatgctttcttcaaccgtctgctgattcccgtcggtctgcatcatgcgcttaactcggtgttctggtttgacgtcgcgggcatcaacgatatccctaacttcctcggcggtcaggaatccatcgaagccggcaaggccaccgtggggatcaccggtcgttatcaggcgggcttcttcccaatcatgatgtttggtttgcccggtgcggcactggctatttaccactgtgcacgccctgaaaaccgcgcgaaagtgggcggcatcatgctggcagcggcgtttgcctccttctttaccggcattactgaaccgctggaattctccttcatgttcgttgcaccggtgctgtatttcattcacgccgtgttgactgggctttccgtgttcattgctgccagcatgcactggattgccggttttggtttcagtgccggtctggtggatatggtgctgtcatcgcgtaacccgcttgcaacccactggtatatgctgatccctcagggtctggtgttcttcgttatctattacgtggtgttccgtttcaccattaataaattcaacctgatgaccccaggtcgcgagctggcggttgccggtgacgagtccgacggttatgacgtgaatgttgataccaccggcaacagcaaggcggatgaaacttccctgctggcccgtcgctatatcagcgccatcggcggttcagaaaacctgacgggcatcgacgcctgtatcacccgcctgcgtcttaacgtcaaagactcttcgctggtggacgatgggttggccaaacgcctcggcgcatcaggcgttatccgtcttaacaaacaaagcgtgcaggtgattgtgggaacccgcgccgagattatcgccggtgcgatgcgcacggtgatgactaccggtccggttgccgccgctgctgcaccggccacggccgcgccggttgccgccgtgaagcctcaggcggtacccaacgcgccgaagcctgtgctggaaacgctggtgtcacctatcaccggtgaggtcgttgcactcgctcaggtgcctgacgaagccttcgccagcggcgcggtaggtgaaggcctggcgattcgtccaacgcagaaaaccgtggttgctccggccaatggcgtggtagtgaaaatttttaacaccaatcacgcgttctgcctcgaaactgaatccggtgccgaagtggtggtccacatcggtctggacaccgtcgcgcttaacggtcaaggctttacccgtttggtggaagaaggggcaaccgttaaggccggtcaaccggtgctggagctggatctggactatctgaacggcaatgcacgctcgatgataagcccggtggtggttagtaatatggaagactattcgggtctgaccctgctggccggtgagtcggtggtggcaggcgagagcaaactgttcgagatccacgcgaagtaaggttggccgtttgttgtgaaaaaaggcgagagtcgttaaaaatcgcagcgggaagggagcaatctcttcccgttttttgtttttagcgcctgtgtccgtggctttacggtaaaaatatttttaatagtttcaaatttggcacttaagggttgtttcccgacgtggcttgttggaacatatgcggttagtctttcgagctttcgttcgcgtagaggaattgaacaatgagtgaggctgaagcccgcccaacaaattttatccgtcagattattgatgaagatctggcatcgggaaaacacgcttctgtcgtgacccgtttcccgcctgagcccaatggttatttgcacattggccacgcaaaatcgatctgcctgaactttggcatcgctcaagactatcagggtcaatgcaacctgcgttttgacgataccaacccggtgaaagaagatatcgaattcgtcgagtctattaaaaaagacgttcagtggcttggtttcgagtggagcggtgaggttcattactcttccgactattttgatcaactgcaccactacgcggtcgagcttattcagaaaggcctggcctatgtcgatgagctttcgccagagcagatccgcgaataccgcggtaacctgactgcaccaggtaaaaacagcccgttccgcgaccgtaccgtcgaggagaacctcgcgctgtttgctaaaatgcgtaacggcgagttcgccgagggcaccgcgtgcctgcgcgccaagattgacatggcgtcaccgtttttcgtgatgcgtgacccggtactgtaccgcatcaagtttgcagaccatcaccagactggcaacaagtggtgcatctacccgatgtacgatttcacccactgcatttccgatgcgctggaagggatcacccactcactgtgtacgctggagttccaggacaaccgccgtctgtacgactgggtattggataacatcaccattccttgccatccgcgtcagtacgagttctctcgcctgaacctcgaatacgccatcatgtccaagcgcaagctgagcctgctggtgaccgagaagattgttgaaggctgggacgacccgcgtatgccaacggtttccggtctgcgtcgccgtggctataccgccaagtctattcgcgaattctgccgtcgtatcggcgtgaccaagcaggacaacaacgtcgaaatggcggcgctggaatcctgtatccgtgatgacctcaacgagaatgcaccgcgtgcaatggccgtcattaacccggttaaagtgatcatcgagaactttgccggcgatgcggttcagtgggttcaaatgcctaatcacccgagcaagccagaaatgggctcacgtgacgtgccgtttaccgctgaaatttacatcgatcaggctgacttccgcgaagaggccaataagcagtacaagcgtctggtgctgggaaaagaagtccgcctgcgcaatgcctacgtgattaaagcagaacgcatcgagaaagacgccgaaggcaatatcacgacgattttctgtcgctatgacgtggataccctgagtaaagatcctgccgatggccgcaaggttaaaggtgtgatccactgggtttctgcttcagaaggcaagcctgctgagttccgcctgtatgaccgtctgttcagcgtagcgaacccgggtcaggcggaagacttcctgaccaccatcaacccagagtctctggtcatcgccaacggttttgttgagccgagcctggcgaatgcagaggttggtgtgagcctgcagtttgagcgtgaaggttacttctgcgccgacagcacttactctaccgccgagcacctggtgtttaaccgcaccgtggggctgcgcgacaactgggaaagtaagccagtcgcataattgatgcgctgacttaattgaaaacgcagccattggctgcgtttttttatgcctgaatcttaaaccgcaggcataaaaaaaccgcttttcagcggtcattttatttccagctctgctcttatccctgagagacagaacttgggcaaggtattagcctttaccgtgcagcgtttcgtcttcaatacagttgcctgcttcgcagtggccgtaaagatagaggctgtggttggttaatttgatgccgtgggtttttgcaatttcacgctgacgcgcttcgatgtattcgtcgcggaattcgatcacacgaccgcagtcgaggcagatcaagtggtcatggtgatgctgctgagtcagttcaaatacagacttgccgccttcaaagttgtggcgggtaacaatgccggcgtcgtcaaactggttcaggacacggtaaaccgtggcaagaccaatttcttcgcccatatcaatcagttctttgtacaaatcttccgcactgacgtgatgacctgccggggcttgcaacacttccaggattttcaagcgtggaagcgtgacctttaagccggctttcttcagtgcggtgttgttgtcagtcatgcggatttagtcctgtcactatgctaatcacgttaatgaaaacggtgggctgttcacaaaaatcgttcctgcctgaatgttgtttctcaaaaaggcaggaataataaaaacagatacagtaagtgtaccttgatacagctgaaagttacaattttgtgcgagttaaattgttaatttcagtgatagtttggccctttcaggtttaaccctaatgattcagggccttagcctttgtgtgggattaaccgataatctcagcgaggctcaactcttcactaatttgtttaacccaggcgtcaacacgttcgttggtcagctctggttgacggtcttcgtcgatagccaaaccgatgaaatgcttgtcgtccgccatgcctttagacgcttcgtagtggtaaccttcggtagaccaatgtccgacaatcacggcgccgcgtggttcaataatatcgcgtacggtgcccattgcgtcacagaagtactctgcgtagtcttcctggtcgccgcagccgaacagcgcaaccagcttgccttcaaaatctatctcttccagcgttgggaaaaaatcgtcccagtcacactgtgcttcaccgtaataccaggtcgggatgccgatcagcagaatatcgtatttttccagatcttctttgctgcttttggcgatgtcctgaacgtcagcaacatctttacccaactgcttctggatcatttttgcgatgttttcggtgtttccggtgtcggaaccaaagaagatacctactactgccataagcttatctaacctcttgttctttaatagactcagagagtctgctttttcgtccgcggcgtgcgagtcaatttatgcaggatgataacaaactcggcggagagagaacatattctcatccgcatcaggctgcgtgaataccccgttgaagcacggatttagtgacgccaatgttaatgcggacctgtttaggatgcatacccgtatttttgatgtgaatagtttatcgggcaattcaggcaagcgttatcgcctttgtgtgctctgttgcggaagtttacaagatgaaacgctaacggcgggtaaccgaaagagttacccgcccgcatcagaatacgatgactagctatcctgaccgttcagatgtgacagcagcatctgttcaatcagctcgctacgactgatattttgttgttccgccaacttgtttagcgcatccacagcttcagcattgatcttcagctctacgcgacgtaaaccgttgtttttgtcacggcgaagctgattacgcttgttaatcctgagctgttcatcgcgagaaagcggatttgtttttggacgtcccggacggcgatcgtctgcgaacagatcaagcgtcgtgcgatccagttgttcttttgccataggtagcggtacaactagggaagttacatcgaaaagcgacctaagcccttttcagatgagatggttacacatttcgggttaataaaccctaacccaatttacctcaggcgcgagaaaaaactgacctggcgcaggggcaaaattacagcgcgcaatcataccctagcgtataccctccacaacgcctaactgccttgattcagcgctaagttattatgattagccgtttttttgaacagttgcgcgtgcggcgggaatatttagcgcgtccttgcgcaggatcacgcatcaatgaaacgagagatggcgcgcaacaccgcctccggcttctcggcatgaacccagtgtccgctccccgcgaccacgtgggcgcgggcttttggaaactgtcgtgcgatgtcgtcgcgatattcgtcctgaacgtaaggcgataatccaccgcgaataaacagcgccggatgtggccaggcgggcacctcggcccagccaacaatgttggcgtactcggccagcaataccggcacgttgaaacgccattcgccctgcgaaaaggacttgagcaggaactgaataacgccgtcctcctttatatattcgtgcatgagccgagttgcgcctgcgcggtccttgatgccagcttctgtgacggcgttgagtgcggcaaagatttcgtcatggcggcgagttttataatccaccggcgctatatcgataatcaccagcttgtcgactcgctctggcgctaaggcggtcagcgccattgcggccttgccccccatcgagtgacctatgacgatcgccttgtcgataccggcgtcgtcgagcgtgtcgcggagatcctcggccatcgcccgataggtcatgaccggtgaacgttcggagagcccgtgattacgcaaatctacctgtagcacactatgctgttgttttagggatcgcgctaatacgccgagattgtccagcgtgccaaacaggccgtgaataagcaggatgggcaacgcggtcgattctgcggattcagagtgttgcagtcgataatgtaatttcatggcagagtccattagacatttattacaggtaaggatctcattaggttatcatgagtcacagaagattttctgtcagatacctgagtgggatacagcaaagcacgcgccgggtaagagttggatataaggttttgtctgctttttgaatattgaggcgatttcgcctttttgtttgcgcagtttaatttgtataatcctttgaataaattaagtagaaaaacagtactggataaagatgaaaacgattgaggttgatgaagagctttaccgctatatcgcgagccacacgcagcatatcggtgaaagtgcatcagacattttacggcggatgcttaaattttctgccggccaggaagtgcaggccaaagccagcgtggcacccgcagagaaaccggccgttgccaccaatacaccgcgcgatcgcgtacgtgccgtgcgtgaactgatgttatccgatgagtatgccgagcagaccaaggcggttaaccgcttcatgcttatcctgactaccctgtatacgctcagcccgaaagaatttgcggttgcgaccgagtctttacgtggtcgtactcgcacttattttgctggtgaccagcaaacgttgctgcaaaacggtattcataccaagccaaaacatgttccaggaaccccttattgggtcattaccaatacgaatacaggccgtaaacgcagcatgattgaacacatcatgcaattgatgcagttcccagccgaactgaccgataaagtttgcggcaccctttaaaaaagcattagggagaaatgccagtggctaacaaccccgcgcagggcaacctgctcagcaaagcgatttgattaacgttgcacaacttacgtcgcagtattatgtgctgcagccagatccgtccaacagcgctcacgcggtaaaattcggtacttctggtcatcgcggcagcgccggacgccacagcttcaacgaatctcatattctggctatcgctcaggctatcgctgaagtacgcaaagagcagggaaccaccggtccatgttacgtaggtaaagacacccacgcgctgtctgaaccggcatttatttccgtgctggaagtgctgactgccaacggcgttgacgtcattgtgcaggaagacaacggtttcaccccaacgcctgcggtgtcgcacgcgattctgacccataacaaaaagggcggcgcgctggcggacggtattgttatcacgccatcacataacccaccggaagacggcgggatcaagtacaacccaaccaacggcggtccagccgatactgacctgacctctgtgattgaaaagcgcgccaacgcgctgattgcagaaggcctgaaaggcgttaagcgccagtctctggacaaagcctggcagggtcagcacctcgtcgaacaagacttggtgcagccttacgttgaagacctggtcaacattatcgacattccggccatacagaaagcaggcctgaaactcggtgttgatccactcggcggttctggtatcacttactggaaacgtattgccgagcactacaacctggacctgacgctggtaaacgactctgtcgaccagaccttccgtttcatgcatctcgaccacgacggcgtgatccgcatggactgctcgtctgaattcgcaatgggcggtttattggcgctgaaagacaagttcgatttggcgttcgccaacgaccctgactacgaccgccatggcatcgtaacgcctgcgggtctgatgaacccgaaccactatctggcggtggcgatcaactacctgttccagcatcgtccacagtggggcgctgacgtcgcggtaggtaaaacgctggtatccagcgcgatgattgaccgcgtggttgctgaccttggccgtaaactggtcgaagtgccggtgggcttcaaatggttcgtagacggtctgttcgacggcagctttggtttcggcggtgaagaaagcgccggtgcgtccttcctgcgtttcgacggtacgccttggtcaaccgacaaagacgggatcattatgtgcctgctggcggcagaaatcaccgccgtgaccggcaagaacccgcaggagcactacaacgaactggccgcacgcttcggtgcgccgagctataaccgtattcaggctccagccacccacgcgcagaaagccgcgctctccaagctctccccagagcaggtcaaggccgacacgctggcgggtgacccgattaccgatcgcctgaccaaggctccgggcaacggcgcgtctatcggtggtctgaaagtcatcaccaaaaacggctggtttgccgcgcgcccatccggtactgaagaagcttacaagatctactgtgaaagcttcctgggtgccgagcaccgcgaaaaaatcgagaaagaagccgtggatatcgtcagcaaagtcctttccgacgcgaagtaattcccgaacgcttttcgcaatctcaatcaaagcgctgtttatacagcgctttttttatgctcaaaattctgtgttgaaaaagatatatctaaatttgtataaaaacttgtcattgagcgaaagtcgatctactttagatatatcgaaactatttcgatatatctaaagagaggaatatttatgtttgctaaatttatggaaggccgccatcgcggtcacggtgaccgactccgccgccatggcggagaaagggatgaacgcacagagtttgcgggtcgtcatcgcggcggaaggcatgctgcgatgggcgaagagcgtggagaagggcgtggcgagagacgttcgcgtcgcggtggcggtcgtggtgagagaatgcagcgcctgtttgaacatggcgatctgcgtctggtgctgctggccatggtggcgaagaaaccgagccacggttatgagctgattaaggcgattgaagaggcgtcatccggcctttacgtcccgagtccggggttatctatccgaccttgacgctgcttgaagagcaggatttccttgagccgctggtcagtgacaacggccgtaaaagctatcgtttgacggcggcgggtcaggaagaactgtcggcacatcaggcggtggttgacgctatctttgcgcgactggcgagacgtgaaaaacgccgcgagcatgggagcaacctggcggaaggcattgctgacagcatgaaccgtctgcgcagcgtactgcgaggcaacgtgatgcgtgacgacctcagccctgagcaggtggaacgggtcaacgcgaccttgttgaaagcagcagaaattatcgaggctgaattcgccgctattgacgccgagcttaaggcataaaacgatagccgacgccggtttctgtcaacaaatgacgcggccgggtggcgtcctgttccagtttttgccgtaaatggcccatataaatacgcaaatagtggctgtgttccacgtagttcgggccccagacgtggctgagcaactgcctttgcgtaatgactttcccgctgttcgcaagcagttcggccagcagacggaattcgatcggcgtgagatgcaagtcttctccggcacgctgtacgcgtcggttaattaaatcgacggtcacgtcggcaaacgtaatcagtgggctttcttgctgacctcctgcgtgacggcgcagcgcaacgcgaacccgcgccagcagttccccaacgccaaaaggcttggtcagaaaatcgtccgcgcccgcatcgagcgcggcaatcttgtcttcttcgctggtgcgggccgacaacacgatgatcggaatactgctccagtgacgaaggtcgcggatatactccagcccgtcgccgtccggcaggccaaggtcgagaatcaccaggtcgggcttacgcgtcccggcctcaatcagcccacgttgcagcgtttcgctctcgaaaactttcatgccttccccctccaacgccgtgcgaacgaagcgtcggatctctttttcgtcttcaacaatcagaatattaatcggggacacgatcagtttcgcctatggagtcagtgggttcgatggattcgatatcgggtaatttttccaacggcagcataaagctaaaggtggctccccctgcgggttgttctctgcccagatacgtccgttgtgtacgtcaataatggcatgacaaatcgctaaccccaagcccacgcccggaatggccgattctttattgccgcgcgaaaacttctcgaaaatctgccgttcgccaccggccataattcctggaccgttgtctgagacatcaacctcgacccagtcctcgctggtccgcgctttgataacgatttttgcctgcgaaccggcatacttgtgggcattttccagcagattgataaacacccgctcaatcaggctggcgtcgcagttgaccaacagcatctcttcgggcaaatccaccgttatttgatggttgctgagcatcggctcgagcatacgcagcgcgctgccaatgatttcttcaaccgattgccactccttgcgcaaattgaagccgcctgactggatgcgcgccatatcgagcaaattattgaccagccttgtggtgctcagcacctgctgacgaatctggttagcctgcggcgcataggccgatccttcgctggccaggtccagcgtgaggatttcggcctggccgaacagcacggtcaatggggttcgcaggtcgtgggagagggcagacagcagcgagttgcgcagctgttcgcgttcggtctccagccgtgcgctttcggccgtcgccgtcagttggaggcgttctagcgcgttggctatcaatacggtgaaggtttgcaacaggcgctgttgctcgggcaccatcagttggcgcacgttgggggctctaccgccagcaggccgagggatttccccgacgcgaccagcggcagcagttgataaggcacgcccggcagcgtatcggtgcctgccccggccggagactgtttgtcgaagctccagcgggcaatcgcctcgtcgacggcaatcgacaggcctgcggcaagatctccctgctggaaattcagcgtaccctcggcgtgctgctgcggtaacagcacggcggccttggcctgcagcgtggttgaaataaaatgacgactggtttgcgccactgcctcggggtcattgcctgactcagccctttggacatttcatacaaatgccgcgcccgtttttcgcgatgacgcgcgatccgcgcctgatagcgcaccccggcggtgagattaccgatcagtacgccaacgataagcattacggcgaaggtcagtaaatactgggcgtcggtgacggcaaaagagccgcgtggctcgaccagaaacaggtcaaagctggcgacattgataaccgctgccagcaccgacggccagcgcccgtagaacagcgccgtcagtaccacgccaagcagatagaccataatcaggttggcaggatcgaaatagggatacagaaactgtgagataaaggtgatgagcgcgcaaagcgccaccgccaccgcgcagccctgtaattgacggcgaaatcgctcgctgaaggtgcgggagtcttgatctcgccgcgaacttaccggcgcggcttcctcgaggctgactatcagcaggtcgagctcgggaccgatttttgccagccggtcggtgatgcttgcgccccatttgaagcgctgctctttgcgacgccccataacaatcttgcccagatgatgctcgcgggcgtaacgcaggatagcctgttcctcctgcgggtcggacagcgtggcggtctcggcacccagctcctgcgccagcttgagagcacgaaggatggcccggcgctggccttcaggcaggcgatgcagacgtggcgtctcgacgtaaaccgcgtgccagacgcagccaagccttgcggcgagtcgtgccgctaccctgaccagcttctcgttcccaccgctgtgaccgatgcacagcagcagggcgtcgcgggtatgccagacacgctccttgccctgcgtgtcgcggaattcacgcatctggtcatcgaccctgtcggccgtgcggcgcagagacagttcgcgcagggcgatgagattgcctttgcggaagaagtgctcgatagcgcgttcagcctgaccggggatataaaccttgccctctttcaggcgctgacgcaggtcgtctggcggcaggtcgaccagcaccacttcatccgcctggtcgaacacatgatcgggcacggtttcacgaataatgatgccggtaacgccgctgacgacgtcattgaggctttcaatatgctgtacgttgacggtggtaaagacgtcgataccggcgtcgagcagttcctcgacgtcctgccagcgtttcggatggcgtgagcctattacgttgctatgcgccagttcatccatcaggattagggcagggtggcggccagcgcggcgtcgaggtcaaactcgctgagctgacgaccgcgatgagtaatgcgtttgggggataaaaggtctaacccaggcaacatggcctgggtttctttgcgtccgtgggtttcgacgacgccgaccatcacgtctaatccggtcgcgcgcaaccgctgcgcctcttgcagcatggcgtaggttttccctacgcccgcacaggcgccgaagaagattttgagctgaccccgcggcttctcgtttgccagcgcgagaaggctgtccgggtcaggccgttgactgtcgtcgtctaccataaacatgccttcttattgttgaggtcatcacttttgtgaggtcaacgcatccagtgccagattcagttgcagcacgttgaccaccggttgtccggtaaagcccagcacaggtgcactggtgttttcgccaatcagtttattgacctgatccagcgtcagttttctcgccgctgccacgcgctgggcctgccagttggcagcctcaacgctgatatgcgggtcgagtccgctggctgatgaagtcaccagatcgaccggcacctgaggcgcactctgcggattggccgcacgcagcgctgccacgcgttcagccacggctttatccagcgccggattgctaactgcaagattgctgcctgaggacgccatcgcattataggcgctatccgaggtggcggaagggcgtccccaaaaataatcaggtcgggaaaaagattgcccaatcaacgctgaacccaccggtttccccgcctcaaaaatcagtgagccctgcgcctgcgaacggaagaccagcgccgacagaccagtggtcagcagcggatacgctacgccggtaaccagcgtaaacagcaccagcagcaccagcgaggggcgaagatagcgatgacgaattgcgttagtcattttatattccttcattctttatcgggccgcttaggccatgtgcagcacagtgaggatcaggtcaatcagcttgataccgacgaacggcacgaccagcccccgaccccgtaaatccacaggttacggcgcagcagcgatgcggcactcattggcctgtagctcacccctttcagcgccagcgggatcagaaacacaatcaccagtgcgttgaaaataaccgccgacataatcgccgaggcgggggagtgcaggtgcatcacgttcagcgcattgagctgtggatacgttgccgcaaacgccgccgggatgatggcgaagtatttcgccacgtcgttggcgatgctgaaagtggtcagcgatccacgagtcatcaacatctgtttaccgatatgcaccacttcaatcagcttggtcgggttggagtccaaatcgaccatgttgcctgcctctttggcggcctgcgtaccggagttcatggcaacggccacgtcggcctgcgccagcgccggggcgtcgttggtcccgtcgccggtcatcgcgaccagacggccttcgctctgatactggcggataagcgccagtttagcttccggtgtggcctccgacaggaagtcatctaccccagcctcggcggcaatagcggcggcggtcaggcggttatcaccggttatcatcaccgtcttgatgcccatcttgcgcagctcggcaaaacgttccttgataccgcctttaacgatgtctttcagctcgacgacgcccagtacgcgcgcaccgtcggccacgaccagcggagttccgcctttgcgtgcgaccgtttcgaccaggccttcaacggcgggcgggaagtggccctgattcgactcgacgtgacggcgaatagcgtcaacggccctttgcggatcattctttcaccgacgttgacgccgctcatgcgggtctgcgccgagaagggcacaaaggtggcattcagcgaattcagatcgcgttcacgcaggttaaagcgctgtttcgccagcacgacgatgctgcggccttccggcgtttcgtccgccagtgaagagatctgcgcggcgtcggccagctcctgttcactcacctgaggcgccggtaaaaattgtgctgcctgacggttaccgagcgtgatggtaccggtcttgtcgagcaacagtacgtcgacgtcaccggctgcctcgacggcgcgaccgctggtggctatcacgttcgcctccagcatgcggctcatgcccgccacaccgatggccgacagcaggcccccgatggtggttgggatcaggcacaccagcagcgcgaccagcacggtgattgtgaccggtgtcccggcatggctggcgtcgacgctaaacagcgagaacggatacagcgtggcggtcgccagcacgaataccagcgtcagcgccaccagaagaatggtcagcgcgacctcgttcggtgtcttgcggcgttttgcgccttcaaccatggcaatcatccggtcaaggaaggtttcgcctgggttgacggtgcactcgacaatcagccagtcggacagcacacgtgtaccgccggttaccgaggagaagtcaccgccggactcgcgaataaccggggcagactcaccggtgatggcgctttcatctaccgacgctccgccaatcagtacctcgccgtcgcacggcacggtatcaccggcttcaatcagcacatagtcgcctttgcgcaggctgtctgcggccactttgatcggcggtgactcagggcgcgcctcgtaaagtttcttcgcccagctggttttctgtacgcctttcaggctctcggcctgcgccttgctgcggccttccgccagcgcttcggcaaagttggcaaacagcacggtaaaccacagccacagggagacgctgccggtaaaggcggcgctgccctcggttttacccatcaaaatcgccagccaaatcagcgtggtgaggatactgcccagatacaccacgaacatcaccgggttacgccactgtacgcgtggatccagttttttcactgcatccagcgtcgcggtacggattagccggggttcaaacagggcacgttgtttgcgagtcatcgtattctctctttaacatctgttgtgcaaatcatgtttggcgtagaaatcagtgcgccagccacacttgtaaatgctcagctaccggacccagcgccagcgccggaataaaggtcaacgcaccgaccagcaggatggtgccgatcagcaggccgataaacagcgggccagcggtcggaagtgtgccgttgcctgcggactgacgttttttggcgaccagcgatccggcgatggccagcaccggaagaatcaccccaaagcggccgaagaacatggtcacggccagcgacaggttgtagaacggtgtgttaacgctcagtccaccaaaggcgctgccgttgttgtttgcggcagaggagaaggcgtagagcacctcgctgaaaccgtgtgcacctgggttaccaatccccgccagcccggccggagtgactagcgccagcgccgtgcccagcagcaccagcgttggtgtcaccagaatcgccagtgcggtcatcttcatatcgaagacgtcgattttcttgccaaggtattccggtgtgcggccaatcatcagtccggcgataaacaccgtcagcagcacgaacagcagcatgccgtagaggcctgagccaacgccgccgaacaccacctcaccaatctgcatcagccacattgggatcatgccgccgagggcagtgaaggagtcgagcatggcgttgaccgcaccgcaggaggcggcggtggtgattacgctaaacatgcttgaagccagaatcccgaagcgggcctctttaccttccatattgatgttgctggtcgcacccagagccgacaggtgtggattaccctgcaactcggcggccatgacaatgactacgcagaccacaaaaatcagcgacattgtccacagcagtgcgtgaccctgacggctatcgcccactacgcggccaaacgagaagcacagcgcacaagggataaggaaaatggccagcatctgaaccatgtcggtcatggcggtcgggttttcatacgggtgtgccgagttggccccgaagaagccgccaccgttggtgccgagcattttgatcgcttcctgagaggcaacaggcccatcggcagcgtctgctgtacgccttcaagcgtggtgatgtgctgataagcctcaaggttttgcagcacgccctggctgacaaaatagagcgccatcagcagggaaatcggcagcagtacgtaaagcgtaatgcgcagcaggtcactccatgcgttaccgatagtcttgcctgaaggacgagcaaaggcgcggatcagcgcaaaggcgaccgcaataccggttgccgccgacaggaagttctgcaccgtcagtccgaccatctggctgaaatagctcagcgcgctttcgccgctgtaggcctgccagttggtgttagagacaaagctgacggcggtgttaaacgccagatcccaggaaaggcttgggaaatgctgcggattccacggcaaaacgccctgcaacatcaggatggccatcagcaggacgatgccgagcatgttgaagccgagaatggctatcgcgtactgtttccagttcatttccgagtcggacgcgcccgccagacccagaactctacgttcgaaccccgccacccttgggccaatgtcaccttcaatcaggctggccataaacttgcccaatgggtgagacagcagcagtaaaaccagcataaagctggcaatcaacagaaacgctgaagcggccatttaaaactcctccgcattaagcagggcgtagaccagatagccgagcagtaaaagaacgagtagcccgccgataattaccccaatattcacaacccaccccttagtttgtttcacccgccacccttggcgttgtagctgcgtgagacttgctacaacgccaaggattttgggaacgatgttgatttgtaatcagtaaagcgagtgtaaatattggcttctaaagaacctgaaaagatggatggggcaggtgtaaaaaaagtataaaaatggcgaattaatcgacgattaacgtctgggaagtagttaattaacacttttgtaacttaattaccggggaaggatgaaattgtgcttttttacgtcaaaatagtggtccgatcagtagtaaaattacagcatgtacgttaaaatttgtacaaataaccaacggtcaatctttccagtctttttccggagcaggtcaatcaggaacgcggactggcccagaggagaatgtttatgtctgattacaccccgtatagccttgcacgcattatgttacggcgcacctttgtcgtgctggtcggcgtagtggcgctacccgtaatgttattccgtgccgatcgtgcacgtttttatagctatctgcatcgagtatgggcaaaaaccagcaacaaaccggtatggctggcacgggccgaaaccgccggtcagtatttctattaagcattagcgcagtataaaaaagcgtccctgattaaggccagcaaccccttgctggccttttcacattttgtcccaaggctgagtacaaacttgtacaaaatgcattttttgtataagtttaatgagggcgatgcatgttttttgcatcgccacggacagcaaatgccaggagtcgcacatgagtgaaaaaattcctattgggatcagcgcctgcctgctgggagagagggttcgttttgacggcggacacaaacgactggccttcgccgttgatcagttagcgccttatgtacattttgaacctgtctgcccggaaatggcgattggccttcctaccccaagaccggcactgcgcctggtgaatcatccagacggcgttcgcatgtgtttcagtaacgaacccaacgtcgatattaccgataaaatgcagcactacgccgagcagcgtattgcctcgctcgcgcacctttgcggctatattctttgcgcaaaatcgcccagctgcggcatggagcgggtgcgcgtctaccgtgaaaacagcaaagacaacagcaaagttggcgttgggatctacaccgccgaactgcaaaagcagctgccttggctgccaatagaagaagacggacggcttaacgaccctgtgctgcgcgagaattttgtcgaacgcgtttatgcactctatgagctgaaaatgctgcaagcctcagggctgtcgcgcggcaaactgatggcgtttcacagccgctataagctctctttactggcgcactctcagcccgaatatcgcgagctgggtcgttttgtggcggcaatggataaatgggcgtcgctcgacgactatttcatcgaataccgcaacaggctgatgactctaatgacccacaaagccacgcggcgcaaccacaccaatgtgctgatgcacgtacagggatatttccgcaaacagctcaatagtggacaacgccaggagctggcaaagctcatcgaccattatcgtcagggtttgcagcctctgctggccctatcacgctgctcaaacattacatgaatgaatatcccgacgagtatctccagcagcagcgctatttcgagccctatcccgaggctctgcgtctgcgttacgggcactgatttcacaaggaatgactggttatgaccacccatttggtctggtttcgtaatgatttacgcatcaccgacaaccgcgcactggctgccgcctgcgcagacgttgatgccactgttatcgcggtgtttattgccacgccggggcagtggcgcaggcacgacatggcgcctcgtcaggccgcgtttatttatcagcacctgctcgcgttgcagtcttcgctggccgagcgcggtatcccgctttattaccagcagtccgagctgttttccgacgccgtcgattggctgaaggcgttcgtcgcagagcacaaggttgatgcgctgttttataataatcagtatgaaatcaacgaggttgcacgggatgctgcgttagacaaggcgttgtcgacagagcttaccctccaccgttttgacgacagcctgcttttgcctccgggttcggtaacgaccggtgagggcggcatgtacaaggtttatacgccgtttcgtcgcgcatttttacagcgtctgagtgagtccgacactcgctcactggccgcaccgcaggcgcgtaacaacccgtataaaggtcaatcagccccgattaagcccttcgactatccgcaggaagaggttggtgacgattttcccataggcgaagaggccgctcgcgaccggctgcggcgtttctgtcgtgaaaatgtgcaggactacctcgagcagcgcgacttgcccgccattgacggcaccagcacgctctctccgtaccttgccattggcgtactgtcgccgcgtcagtgccttaatcgcctgcgcgcggaacatcctcacgcgttggaaaaaaccgacggtggcgcgtttggctggctcaacgagctggtctggcgtgagttttaccgccatttgctggttgcctggccgcatctttgcaagcacaaacccttcatcgagtggacggacggcgtgcgctggcgcgatgctcctgacgatttaaaggcctggcaggcgggtaaaaccggctatcccatcgttgacgccgccatgcgtcagttaaacgccaccggctggatgcacaatcgtctgcggatgatcgtctcgagctttctggttaaggacctgcttatcgactggcgcagcggcgaacgctacttcatgtcgcagcttcttgacggcgatctcgcggccaacaacggcggctggcaatggggagcatcgaccggcaccgacgcggcccctactttcgcatcttcaacccgacgacgcagggagagcgtttcgacaagcaggggcgcttcatcaaggcctgggttcctgagcttgccgaggtgccagaaaaagatattcaccacccacatcaatgggccgagaaacagcgccgcgtgctagactatcctcacccgattatcgatcacgcccgagcacgcaaggatacccttgcggcgtttgaaaccgctaaaagtcgcgctcaggctgacaactaaggcttactgtcttggttaaggatcggcacaacatggagcgatgtgatgacaacaagatggtggagcacggccctgtttctcggggccggtttaggctacgcattcagcgccaacgcgggctttaaggtagtcgcgctgggcgtcaacggcggggtggaagagggaaatctgacctcgtatctgattcgcagtgattcgcaaacgcgctatctggcgctcgacgccggttcggttctgccgggtatcagtaaggcattggcaaaaggcagctttcctgaggtcacggcgcaaaattcagcgccgtttacgccacaggggcggtatttcgccaactgattagcgcctacttcatcagccacggtcatcttgaccatcttgccgggctgatcgtcgcctcaccgcaggacagcaaaaaaccgatttacggcaccaatgacaccatcgatattctgcgccagcactatttcaattggcgagtgtggcctaatttcagcgactcaggcagcggccagcgcattggcacctatcgactaacggcgctcagaccggggcagcgcgcgtcgttgggtaccagtggcctgagcggcgtcgtttatccgctcagccacggcggcgtcagttcgtcaatgctgttggtcagtaatgaactggcgagccaacagcaggaaacctttgccttctttggcgataccggtgccgataagcaggagaagtcgcgcgatctcggcgctatctggcgcgtgttggggaggagattaaacagcatcgcctcaaggggatgattatcgagacctctttcccgaatggtgttcctgatgcacagctctttggtcacctcaccccgcgctgctgctgggtgagctgaaaaacctcgagcaggcggcagggggcgcgggctcgctcaaagggctgaagattgtcatcagccatatcaagccgtcgttaatggctggggcagacccgcgcgccgagattatgcgtcagcttgaagaggggaatcgcctcggcgtacacttcatctttatgcagcagggcgacagtcaggcgttttaacgcttctgcttcgccacctttccggctctgcgcaacaccaagatttatggaaaatgttatgaataacatagaattagaaaaaattatcgaccgtaagctcgacgtcaacgccttcaaggattacgcgccaaacggcctacaggttgagggcagcagcgaagtcaaacgcgtggtgacgggcgtgaccgccagccagaagctgctcgacgctgccgtcgcgcacggtgcggacactcttatcgtccaccacggctatttctggaaaaatgaacccgctgcggtgcgagggatgaagcgtaatcgtctgaaaacgctactgcttaatgatatcaatctttacggctaccatctgccgctcgatgcgcatcctgagctgggcaataatgctcagctggctaacctgtttggcattaaggtcttgggtgaaatcatgccgctggtgccttacggcgagctagaaacgccgctggcggctgaagagtttcatcaggtgattgaacagcagctgggtcgcaaggtgttgcacagcgccgagggcggaccgcagacgattcgtcgtatcgcgtggtgctcgggtggcggtcagggctttattcagcaggccgccgactttggcgtcgatgcgtttatttctggcgaagtctccgagcaaactattcacatcgctcgcgagatggggctgcacttctttgccgcgggccatcacgccagcgaacgctatggcgtgaaggcgctgggcgaatggcttaccgccgagcacggccttgacgtgacctttatcgatatcgataacccggcgtaaaccttatcgaccttgtcgcgcgaccctcggtggcgcgacatcttcctcgtcttgttcttcttcttttaacgtgatgtcgctgtcttcgagcagaataaacgcacgttgaagtccggtatccgcctcggggtcggcccctgttcacgcctctccgccaccttgtctgcgtcagacgcctccgcgggcgtaatctgttctactgtctcgtgcgcaggcatctgatcctgaatcatctgttcatcgagatttggattcagcgcaggtgacagcggtgagctgctcaggctgtctggcatcgcgatgtgtggcaccggcgcatctaccgccatctgcgtctgctgctctttcgccgaggtgcgactcagtgccacaatacccgccgcgcaaagcgcaaagaacgcataaagaatcttgccgcccagcggttcaatcagcgccccaacgagcaagggaccgatacaggcacccacgccgaaggccattaacagacaggcagaaagcgataccctgcgctccggttcaatcatgtcattggccagcgccacgaccagcgggtagagcgtgaactgcatcaggctgacgatgaatccgcaggccaacagcagcgggaaagagatatggctgaaaaccgccagcggcagtgccgtgatggccaacagcaacgcattgatacgcatcagcatattgcggttatagcggtcagacagccagcttagcggaaactgcgcgaccagaccggcgaatatcgccaaagccatgaacagaccggtttgctgtgtcgagagcgactgttggctggtatagagcggtgccatgccgtaaaacgccccgataatcatgccaattaccagcgtaattgccagcaccttggggatcgcgccgataaagaatttcagctccatgggggccggcgacatatgtccaaccttggtccgggtggtcaacgcgatgggcaccagacacagggcgaagcacagcgcgataactaacagagtgctcatgccgagtccggtttgcagcatcagcaccacctgtcccagcgccatgccgaggtaagaggccgccatataaaaaccgaagacgacgccgcgctggctcgattccgactggtcgttaagccagctctcaagcaccatgtactgacacatcatgcatagcccgataatcaggcgtagcaccacccagatgggaataatctcggtcagtccgtggcctatcaccgctgccgtaatgatacctgagcaggatacgtaggcccgaatatgcccgacgcgggcaatcaggtaatggccaaccttgccgccaatcaccagaccaatatagttagcggcaatgattgccccaatcatggcaccgctgacgtttatcgcgctcagacgcagggagacgtaggtggtgaggaggccggaaccgagtagcatcaacaacgtggtggtataaagcggaaaaaaaacgccgaaggtctttttcactgtttctcccttttaaatgaggcaatcctcccttttacgccttccaggccggcggaggtttgcagaaacataagacacactggcggtcttttgcctaaaggatagcagcagatcgccgcttcgtccttcacgggaccgcgtctgccaccatttttagcctatatctgagccacaaatagcgttatcttaatttgtatattatctgtggcttaggagtcattaattgcaacgagcacggtgttacttgttaggtgaacgcgctgtcgttctcgagctggagcctcccgtttcactggcgagccagcagcggatctggggactgtcccaacgtctggcgcaggacgccagcgtcaaggaggttattcccggcatgaataatttaaccgtgatactggccgaaccgcaacattctgcccttgatgctatcgagcgtttgcagacctggtgggaagagagtcaggcgtttgagccggagtctcggctggttgaaattccggtggtctatggcggcaaggggggcctgatcttgagggcgtcgccagccataatggcatgaccgcgcgtcaggtggtggagtgccacagcggcgcagagtacatcgtttatttcctcggcttccagcccggtttcccctatcttggcggcatgccggaggcgctgacaacgcctcgccacgccgagccgcgtctcagcgttccggcgggaacggtcggtattggcggcagccagacgggcatttacccccttattacccccggcggctggcagcttatcggccatacgtcgcagccgatgtttgatcctaagagccgtttgccgaccctgttgcgccccggtgaccgggttcgctttctgccgctgaaggagggcgtatgttaaaagttttacgtgccggaatgcagactaccgttcaggaccttggccgtgaaggctatcgtcaactgggcgtcagccagtcgggtgcactcgatgcgcccgcgctgcgtatcgccaacctgctggtgggtaacgatgaaaatgccgccggtctggaaattacgctgggtcaattcagcgtccagtttactaaaaagggctggatagcgctgaccggcgcaggcagccacactacgctggacggcgtgtcgttgtggacaggctggtgttatccggtcaaggcaggtcaagtgctgaccatgaagatgccgatgcgcggtatgcggagctatctggccgtggcgggaggcattaacgttcccgaggtgctcgactctcgcagcaccgacatcaaagccggattcggtggctttgaaggccgcgcgctgaaagacggcgacgtgctgtcggtcggcaaggcggtaaaagagccgcaaaaatccaccggcgttaagcagctgctgttcggtaaccgtatccgcgcggtgccggggccggaatatcaggaattcagccacgatgcacgcgagtcgttctggcgcacggcgtggcagcttagcccgcagagtaaccgtatgggataccgcctgcacggccatgagctgactcgcgaaaccaaacgcgaaatgctgtcgcacggcctggtgccgggcgtcgtgcaggtaccgcacggcggccagccgattgtgctgatggccgacgcgcaaactaccggcggttatccacgcattgcctgcgttatcgaggctgacctttaccatcttgcgcagattcgtctggggatgccgattcacttcgtgaagtgtaccgttgaagaggctctgcacgcgaagcgtgaacaagatcgttttatcgaacaaattaagtggggactgcatgagcgttgatttaaatgccgaccttggcgaaggctgtgaaaatgatgaggccctgctgcaactggtgagttcggcgaatattgcctgtggttttcacgccggggatgcgcagaccatgttgcagtcggtgcgttgggccatccagtacggcgttgcgattggggcgcatcccagcttccccgaccgggaaaactttggtcgtaccgcgatgcagcttccgcccgaaaccgtttacgcgcaggtggtctatcagctcggtgcattggcggcgattgctcgcgccgagggtgggaaaatggttcacgttaaaccgcatggcatgctctacaatcaggcagcgacggacgaagtattgtctgacgccatcgcccgtgcggtgcatgacgttgacccatcgttagtgctggtggggctggcgggcagtgagctcattcgcgccggtgaacgtctgggcctgaaaacgcgtcaggaggtgtttgccgaccgtcgatatcagagcgacggcaatctggtgccacgcagccagcctgatgcgatgatcgagaccgatgcgcttgcgctggagcaaacgctgggcatgattttggaccagcaggtcgttagccgtgacggagtgaaggtaccggttcaggccgacaccgtctgtctccacggtgatggggaacatgcactggcctttgcccgcagcctacgcgccgcatttgccgagaaaaatattccggttagcgccgagtagttttgcactttgattgtggatgacggtgagtcgtttgagctgtcatctgcccataaggatcagtgatgcgtaaagttctagtgaccggttttgagccattcggcggtgaacgggtgaacccctcgtgggaagtggtgaaaaaattgcaggacgtgcagctttctggcgtcagtctggccgtgcgccaattgccctgcgtattcggcaaggcaatctcagccctgaatctggccatcgacgaggtggatcccttgatggttatctgcgtcgggcaggccggtgggcgcgtcgatttttccattgaacgcgtggctattaacatcgatgatgcgcgcattgcggacaacgatggccaacagccggtcgaccagccgattgttgccgagggacctgcggcctattttgctcagttgcccatcaaggcgctggtcaacggactgcgtgaggcggggatcccggcctcggtatcacaaactgccgggacttatgtgtgtaatcacgtgatgtacggtctgttgcaccgtatggcgcgggcgatagcaacgtgatgaaaggtgggtttattcacgtgccttacttgcccgagcaggccgcgctgcaccccggcagcgccagcatgtcggaacatacgctgctggaggcgttagagttaactatcgctattgcgctgcacactgaaaaagatttatctgtcgcagaaggagccacacactaatgccagaaggaccagaaatccgcagagcagcggatttgcttgaaacggcggtagtcgataaacccttgactgacgtctggtttgctttccctaagcttcagccttatcaaccctcattgataggccagcgcgttaaaggcattgagacgcgcggtaaagcgctgctgacgcacttcactaacagcctcacgttgtatagccacaaccagctctacggtgtctggcgcgtatttaaacccggcgacgttatcgaccacggtaagcgttcactgcgggtgaagattgccacgccggacagcgctattctgctctacagcgcatcggatatcgaaatctggccgacggaagaagtctaccagcacccgttccttcagcgaattgggcctgatgtgcttgacgtgacgttaaccgttgaagaggtgagggcacgtctgctatcccgacgctttagccatcgtcagcttggcgggacgctgctggaccaggcgtttctggccggtctgggcaactatctgcgtgccgaaattctgtggcaggcgaagcttttgccctcacatcgcccggcagatttaaacgaccaacggctggatctgctcgccgatgcctgcttgtctatcgctcgtcactcttacgccatgcgcggcacgatggatgaaaacgtgcaccacggcgcgatgttccgctttaaggtgtttgctcgtgaaggcaagccctgcgaacgctgcggggcggctatcgtgaaaagcagcgtctcgtctcggcctttctttagctgtccgggatgtcagatgtaaagcgacctgccgacggttttaagcagttaagtcgtagagcaatagatcagtaataggtgcgcttgcatctattactgcctactgtttcgacagatatatatgacaggcttttatgaattagtcagtatcgctaccgcgatatggcctcgctcagggcactcaacaattccgctcttccacggaggttaaacatatgctgctcctcgtcaagagtttgcaggaagtcatcactcattttcagtaatgcattctggtaattttcactagtttgtttggaaacgacctccatcgccttggcgacaaaaagcccgcaggcgtcaggacagaatgtctgaaggtctttgctaatggtcaagatgtttcccgctgcaccacaatctttagccagtttcttaaaccgttcatagttttctaagtcagatgcgccattcatactgtcaaacatcagggcttgcttagtatttgtgctgtcgtaaaaagtgccaaacaggtaccagtgctcatttaataatagtgggacgaaatgcgtttttacggtgcttctattattgacgtcaaataattcgataagacgctgggaagcggtagcattatccgtcggtaattccctcgcttcgtgaaataaggtggtttttgagaaagtttttcctaaatcgtcagttaatttttttgaaaaggcatcaatttcgactgaggtaataaatcggttgttgtcaaaaatagtgttttcgttagatgtttcgtcattgtttactatatttttcaagtgttctatggactgataaattgtctcggcgatctccggtttgtggtcgagaacaccttcttcctgcggcttgaatccagcaataaacaacagttttggagggattttccagtgattctctggggggtatttatatgttcattatgctttttaactataataaataaatttagacttttttcctctataattttttttatttccggattttgtgggcaattttgcttaccggtatataaatcaaagatgaatttctgtgcttctaaagcctctgacgcatctattgacgcattttttgaagcctttgcaatatcttctgccgtcttttcttttccaacacgtgcgggagtagatagacccctccacaggcggaaaaaaacatccggtcaagagcataatttgaaagaggcttcccaaatataatctcatgtttaaaatcgtttttagtttttggcaggatcctttcgtcaatttgagcgtaaatatgcttttcataagagttacgaggtagggggctccttctcgttgaggattgactataaagaggattatctatgaggttaagctcggtatcattctctgacacgcccatagaattctgcgagccgctatcactggtgctgctcgtcgggcttgaagagtcagtattgtcatcgctctcatgtctcgatctattagtgactgaagcagttaccggaagggggtctccagattgttttggcaatcgattctgattctgattggaatcctgatttgataatttaattttgccgcgcaagttaacgaaagaattaacacagtcattgagcctgttaagaaaagattcattataatcttccgtgctgtatgagcttgcagaagataaatcttcactggatgaatgattaaacggctctggataagggtcgaccaaagaatatggtggagggggcgggagtggttccagtggcagtggcagtagtggtggtgcctgccttttatagttaccttgctgtggctttctaagaacgaaattagatttcatcgaagatggagaagatttaacatctttgggagtaataaacggggccgtaagtttagtgtcaagtttaccgaaaataggcgcttcaaagggcgtctcttttgcatctatgtcggtttgttgtgtcacttgtatattgcgttgtgctgccgatgttatgccgagtgccatggcagtgctcctggattggtaaagttgcccagtatgctatttatgcagtaaagatgggtatcaaggatcgcttatttattggaaaggagaacgtttttctgtttcataaaacaataaaaaagccccttaaccggtcgatttctctagggtcaaggggcgctttaatggctgctgacaacggcagctattttaatgacttatggtcgacctgggacttgaaatcacgtttggtgtagccggtatacagctgacgtggacgggcaattttgatgccgtcatcgtgcatttcgttccagtgagcaatccagccaacggtacgcgccatcgcgaagataacggtaaacatcgaggatggaattcccatggctttcaggatgatacctgaatagaagtccacgttcggatacagtttacgctcgatgaagtacgggtcgttgagcgcgatgtgctcaagctgcatcgccacttccagcaggtcgtccttcatgttcagctcttccagaaccgcatgacaggtttcacgcatcacggtagcgcgcgggtcatagtttttataaacacggtgaccaaagcccatcaggcggaaggaatcgtttttgtccttcgcacgacgaacgaattctggaatgtgatcgacggtgcttatctcttccagcattttcaggcaggcttcgttggcaccgccgtgagccggtccccacagcgaagcgatacctgcggcgatacaggcaaacgggttagcgcctgaagagcctgcggtacgcacggttgaggtagaggcgttctgctcgtggtcggcgtgcagaatcaggatgcggtccatggctttttcaagcaccgggttaaccacgtactcttcgcacggtgtggcaaacatcatgtgcaggaagttaccggcataggacaggtcatttttagggtaaacaaacggttgtccgatggagtatttgtaacacattgcggcaacggtcggcattttcgacagcagacgaaacgctgcaatctcacgatggcgttcgttttcaacgtcgatagaatcgtggtagaacgccgccagtgcgccggtcacgccacacagcacggccatcggatgcgagtcgcgacggaagccgtgaaacagacgggtaatctgctcatggatcatgctgtgacgggtcaccgtcgttttgaattcttcatattgtttctgcgtgggtggctccccgttcagcagcaggtagcacacttccagatagtttgattccgttgccaactggtcaatcgggaatccgcgatgcagcagaatgccttcatcgccatcgatataggtaattttggattcgcaggatgcggtagaggtaaagccagggtcaaaggtaaaaaaaccttttgagccgagggggcgaatgtcaatctcgtcctgtcccagcgtgcctgatagcacgtcgagttcaataggatcatgaccctgtagggtaagtgtcgctttcttatcagccatttacagtctccttagcgccttattttaataatctctaacaactctgtccttggtctggttgcagaacccggtactgcctgcgagctatctccgccgttgtaatgtgaggtcctcgctgcgcccgtcgagttggcgtaatgcgaagccgtgttactgccactgcgtgcagtttatggcggccaggcggcctttcattgttgttattgatccgatatctttgctcaatacctacgacaagtatgagggcatacacgagctacacttttgcacaactcggcgtcgcagggaagcggatgtgttgatatgaagtaaatctcaaggataaatcatgtcgtaatttgtaatagaaatgttagcacagtgtcaaacaagataatttattttgtgtataatatggaaaatgagaggtgaatcactgtttcgtagaaaagtgaccaaacattttgtaggggaattgtaataggaatgtgatcatcctatactcctccaaggtctccggaacaccctgaagtaggagcacccagcgttatgtagaacgcgccgtttaagcacagtggatgtcgatgtttgagcgcgtgacgtgaagggccattgggttctaacgctgtctgatttccgcccaggccggaggatggaaaataataagcgccattcaagatgtactgcgctcggtctgctgtgttaaaacaagcacgaaacgcccctttactgctgttaggtgtaaaccggctttatcgcttatttttgccttgtatgtaccccgcaggatgtttatgaacaggctctaagggctgtgtgggctaaaccgtgaaaaaacaaagacctgtcaatctggatctgcaaacgatccggtttcccgttactgcgatagcgtccatcttacaccgcgtttccggcgtaataaccttcgtcgctgtcggtatcctcctctggttgcttggtacgtctctttcctctccggaaggattcgcgcatgctgccgccatcatgaacagcttcttcgtcaagttcatattctggggaatactgaccgcattggcctatcacgtctgcggcggcattcgccacctgctgatggattttggcgtcatcgaagagagtttggctgtcggtaagctgtcggcatatattgcgattggcattaccgtactgttgtcaattcttgctgccgttttcgtagcgtagggtattaaaagtatggttaacaatgtttctgcattgggacgtaatggcgttcatgactggctgttggttcgtgcttcagctatcgttatcaccctgtatatcctctatattcttggcttcgtcgtcatggctcgggacatcgattttgaagtctggcacggattttttgcttcttccattactaaagtgttcaccttgctcacgctgctttcgattctggttcacgcctggataggcatgtggcaggtgttaactgactatgtcaaacctctggccgtgcgtctggtgctgcaacttgcgatcgttgtcacgctagtggtttatctgctttatggaacaatagttgtgtggggagcgtagtaaatgagtctgccagtcagagagtttgatgccgtcgtaatcggtgcaggtggcgccggtatgcgtgccgcattacagatttcacagatgggcctgtcgtgcgccctgatttccaaagtgttcccaacccgttcccacacggtgtctgcgcagggcggtattaccgttgccttgggcaatacccatgaagatgactgggaatggcatatgtatgacaccgttaaaggctccgactatatcggtgaccaggatgcgattgaatatatgtgtaacaccgggccggaagcgattctcgagctcgagcatatgggactgcctttctcccgtttagacaacggcaaaatttatcagcgtccgtttggtggccagtcgaagaacttcggcggcgagcaggcggcacgtactgcggcagcggctgaccgtaccggtcacgcactgcttcacaccctttatcagcaaaacctgaagaatcacaccaccattttctccgagtggtatgcactcgatctggtgaaaaatcaggacggcgctatcgtcggctgtaccgctatctgcatcgaaaccggtgaagtcgtgtacttcaaggcgaaggccaccgtgctggcaaccggcggtgcaggtcgtatttaccagtcaaccaccaatgctcacatcaacaccggtgacggcgttggcatggcgctgcgcgcgggtgttccggtgcaggacatggaaatgtggcagttccacccaaccggtatcgccggtgcaggcgttctggtgacagaaggctgccgtggtgaaggcggttatctgcttaataaagacggcgaacgcttcatggagcgttatgcgccgaatgccaaagacctggcgggtcgtgacgtggtagcgcgctctatcatgatcgaaatccgtgaaggccgtggctgtgacggtccttgggccctcacgcaaaactgaaactggaccacttaggtaaagacgttctggaatcccgcctgccgggtatccttgagctgtctcgtacctttgctcacgttgacccggtcaaagagcctattccggttatccctacctgtcactatatgatgggcggcattccgactaaggtgaccggtcaggctctgcgcgtcaacgccaaaggcgaagacgaagtgatcccgggcctgtttgcggtaggcgaaatcgcctgtgtatctgttcacggagccaaccgtctgggcggaaactcactgctcgacctggtcgtgttcggtcgtgcggcgggtatgcacttgcaggaatctctgctggagcagggcccaagccgcgatgccagccagtctgatatcgatgcggcgctggagcgtatgaaccgctggaacaacacccgttcgggtgaagatccggtgcaaatccgcaaggatctgcaggcttgtatgcagaacaacttctccgtattccgtgaaggcgacgcgatggccaagggtctggaagatctgaagcacatccgtgaacgtttgcagaatgcccgtctggacgatacctcgactgaattcaacacccagcgtatcgaatgtctggaactggacaacctgatggaagttgcactgtctactgcggtatcggccaactatcgcaccgagagccgtggcgcacacagccgcttcgacttcccggatcgtgatgatgcgaactggttatgccatacgctttaccaaccggaaaccgaaagcatgactcgccgtgaggtgaacatgcagcctaagctgcgcgcggcattcccgccgaaagcacgtacctactaggccggtgagcaggagcatataaatgaaactcgaattttcgatttatcgctataacccggacgtagacgacgttccgtacatgaaagactatgtgctggaggccgaagaaggccgtgacatgatgttgctcgacgcacttattctgctgaaagagcaagatccgacgctgtcgtttcgtcgctcctgccgtgagggcgtttgcggctctgacggtgtgaacatgaacggtaaaaacggtctggcctgcatcacgccggtatctgcactgcgtaacggcagcaagaagattgttatccgtcctctgccgggtctgccggtggtgcgtgacctggttgtcgatatgggtcagttctacaaacagtatgaaaagattaaaccgtatctgatcaatgacggtaaaaatcctccggcgcgtgagcacctgcagatgccggaagagcgtgagaagctggacggcctgtacgagtgtattctttgtgcctgctgttcaacctcttgcccgtcattctggtggaatccggacaaatttgtgggacctgccggtctgctggccgcgtatcgcttcctgattgatagccgtgacacagaaacgcaatcacgccttgataatcttgacgacgctttcagcgtattccgctgccacagcatcatgaactgtgtcagcgtgtgtcctaaagggttgaacccgactaaggccatcgggcacatcaagtcgatgctgctacagcgcggtgcctaagccgaaaagtacgaaaaaagcgggaactcaggttcccgctaatattaagtgaacaagcagtaacaattacgcaacaaaatgcacagacacagcgcgaataagctgatgaaatgactgggtaaagggtgataattttggcccgttaacagtatatttatgtctgcgtaaaaagaggaacacagggaagcaccaaaagctcgagtaagcggttaatgcgcaggcttttggaggttccttgaccggtcgacgggcatcaaacctgtcggttaagtgaactgttgtatggaaaaccgtcttactcggatgtaagtcaaaattacgtcaggtaccacggtgattttattaaccacggcgaaaactaaagctttcaaagcttaagggatcacgatgcagaacggcgcaatgaaggcctggctggattcctcctatctggcgggcgcgaaccagtcttacatagagcaactctatgaagactacttaaccgatcctggttccgttgacgatagctggcgttcaattttcaaacagctaccgacagtcggtgtcaaaccggaacaactccattcacagactcgagactacttccgccgcctggcgaaagacgcttcgcgttataattcagcaatcagcgacccgcaaaccgatgcgaaacaggttaaggtgttgcagctcatcaacgccttccgtttccgtggtcatcagaatgctaatcttgatccctcggtttatggaaacaggaaaccgttgctgacctggatcctgcttaccatcatctgtctgaggctgattttcaggaaaccttcaacgtgggctcgtttgctatcggcaaagagactatgcagctgggcgaactttacgccgcgctgaagcagacctactgtggatcgatcggtgccgagtacatgcacatcaccaacacggacgaaaaacgctggattcaacagcgtatcgaatccgttgtcggccgcgctaagttcaacgaaaccgagaaaaagaccttcctcaaagaattaaccgcagccgaagggctggagcgctacctcggtgctaaattcccgggcgcgaaacgcttctcgctggaaggcggcgatgccctggtacctatgcttaaggacatgatccgccacgccggtaaaaacggcacgcgtgaagtcgttctgggcatggcgcaccgcggtcgtctgaacgtattgatcaacgtgctgggtaaaaaaccccaagacctgtttgatgaattctcaggtaagcataaagagcatctgggtaccggcgatgtgaaatatcacatgggctattcgtccgacgtcgaaactgaaggtggtatggttcacctggcgctggcgtttaacccgtcgcaccttgaaatcgtcagcccagtggttatcggttccgttcgtgcccgtcgcgatcgtcttgacgaagcgcgcagtaacatggttctgccaatcaccattcacggcgatgcggcgattaccggtcagggcgtcgttcaggaaacgctgaacatgtcgttggctcgtggttatgaagtgggcggtactgtacgtatcgttatcaacaatcaggtaggtttcactacctcaaacccgaaagacgcgcgttctaccgaatactgtaccgatatcgcgaagatggtgcaggcaccgattttccacgtgaatgccgatgacccggaagcggtggccttcgtcacccgcctggcgctggatttccgtaataccttcaagcgtgacgtaatgatcgacctggtctgctaccgtcgtcatggccataacgaggccgacgaaccgagtgcaacccagcctctgatgtatcagaagatcaagaaacatccaacgccgcgcaaaatttacgcggacaaactgaccgagcagggcgtagccagccaggaagacgccacggaaatggttaacctttaccgtgatgcgctggacgcgggtgagtgcgttgtggacgaatggcgtccgaacgacatgcacaccttcacctggtcgccttatctgaaccacgagtgggacgaaccttatccgtctaccgttgagccaaaacgtctgcaggagctagcgcgtcgcgtcagccacgtgccagacgccatcgagatgcagtctcgcgtcgccaagatttatagcgatcgtcaagacatggccgaaggcaagaaactgttcgactggggcggcgcggaaaacctggcttacgcgacgctggtcgacgaaggtattcctattcgtctctccggtgaagacaccggccgtggaaccttcttccaccgtcatgcggtaatccacaaccagaaaaacggctctgtctacgtgccgctttccaacatccacaacagtcagggcgtgttcaacgtctgggactccgtgctgtcggaagaagccgtgctggccttcgaatatggttatgccaccgcagaaccgcgcaccctgaccatctgggaagcgcagttcggtgacttcgccaacggtgcacaggtcgttatcgaccagttcatcagctccggcgagcagaaatggggccgtatgtgcggtctggtcatgctgctgccacacggctatgaagggcagggtccggagcactcctccgcccgtctggaacgttatttgcagctttgtgccgagcaaaacatgcaggtatgtattccgtctacgccggcgcaggtttaccacatgctgcgtcgtcaggcgctgcgcgggatgcgtcgcccactgatagtgatgtcgcctaagtctctgctgcgtcatccgctggcagtgtctacgctcgacgaactggctaacggcaccttccagccagcgattggcgaagtggacgagctagacccgaaaggcatcaagcgtgtcgtgatgtgttcaggcaaagtctactatgatctgctggaacaacgtcgtaagaacgaacaaaccgacgttgccattattcgtatcgaacagctgtatcctttccctcacaaagccgtacagagcgtgattgagcagtatgcgcacgtgcacgactttgtctggtgccaggaagagccgctcaaccagggcgcgtggtattgcagtcagcataacttccgtgaagtggtacctttcggtgcttctttacgctacgcgggacgtccggcttcagcctcgcctgccgtgggctatatgtcagttcaccagaaacagcagcaagatctggttaacgacgcgctgaatgttcaatagtcgtttaattttgtaataatttacccacagtacctggcgccaagcctatgcagcgccaggtaaagggaaaaataaggattgataatgagtagcgtagatattctggtccctgacctacctgaatccgttgcagatgcgacggttgccacctggcacaaaaagcctggcgacagcgttgagcgtgatgaagtcctggttgaaatcgaaaccgacaaagtggtgctggaagtgcctgcaagcgaagccggtattctggactccattctggaagacgaaggcgccaccgtgctttctaaacagatccttgctcgtctgcgtccgggtaacagctctggtaagccaagccaggaaaaaagcaccgctaaagaatctacgcctgcggaccgtcacactgccgcactggatgacgagagcagcgacgcgctgagcccggctattcgccgcctgatagccgagcactcactggatgccagcgccattaaaggcagcggtgtgggtggtcgtctgacgcgtgaagatatcgagcagcacattgccaagtctggcaaggctgacaaacctgcggcagcgcctgcagcagcacagcccgcagcagcagcgccagctctgggcgcacgcagcgaaaaacgcgtgcctatgacccgtctgcgtaaacgcgttgccgagcgtctgcttgaagcgaaaaacagcaccgccatgttgaccacgtttaacgaaatcaacatgaagccaatcatggatctgcgcaagcagtacggcgaagccttcgagaaacgccacggtgtgcgtctgggctttatgtctttctatctgaaagccgtcgttgaagcgctcaagcgtttccctgaagtgaatgcctctatcgatggcgatgatgtggtttaccacaactacttcgacgtcagcattgctgtatcaacccctcgtggcctggtgaccccgttctgcgcgacgttgatactctgggcatggcagacattgagaagcaaatcaaagagctggccgtgaagggccgtgatggcaaacttaaagttgaagagctgaccggcggtaacttcaccgtaaccaacggcggcgtgttcggctccctgatgtcaacgcctatcatcaatccaccgcagagtgcgattttgggtatgcacgcgattaaagaccgtccaatggccgtcaacggtcaggtcgttatccagccaatgatgtacctggcgctgtcctatgaccaccgtctggttgacggccgtgagtcagtgggcttcctggtcaccatcaaagaaatgctggaagatccttcacgtctgctgttagacgtgtagtcgttctctttatcgcgtgaaaacaagtgcagggcaggagtatctgctctgcaatcttctgaaatcaatggatagaacatcatgaatctacacgagtaccaagcgaaacagctgtttctgcgctatggccttcctgcccctacaggttttgcttgttccaccccgcgtgaagcggaagaggctgcatcgaaaatcggtgcgggtccgtgggtagtaaaatgtcaggttcacgctggcggccgtggtaaagcaggcggcgttaaagttgtgaagagcaaagaagagatccgtgcctttgccgagcactggctgggtaaacgtctggtgacctatcagactgatgcgcagggccagccggtaaaccagattctggttgaagccgcgaccgacattgataaagaactgtatctcggtgccgtcgttgaccgtagctcacgtcgcgtggtgttcatggcgtctaccgaaggcggcgtggaaatcgagaaggttgctgaagaaaccccacacctgatccacaaagttgcactcgacccgttggcaggtccacagccttaccagggccgtgaactggcatttaaactgggtctgagcggcaagcaggttgcacaatttaccaagatcttcatgggtctggcgaacatcttcctggagcgcgacctggcgctgatcgagattaacccactggttgtgaccaaagagggtgaccttatctgcctcgacggcaagctgggcgctgacagcaatgccctgttccgtcaaccagaactgcgcgaaatgcgtgaccacagccaggaagacgctcgtgagtctcaggctgctcagtgggaactgaactacgtggcgcttgatggcaacatcggttgcatggttaacggtgcgggcctggcaatgggtaccatggatatcgttaaactgcacggcggcgaaccggccaacttcctcgacgtaggcggtggcgcaaccaaagagcgtgtaaccgaagcgtttaaaatcattctgtctgatgacaaagtgaaagcggtattcgttaacatcttcggcggtatcgtacgctgcgacctgattgccgacggcatcattggcgcagtggctgaagtgggcgtcagcgtaccggttgtggtacgtctcgaggggaacaatgctgaactgggtgccaaaaaactggcagacagcggtttgaacatcattgcagcgaccagcctgactgacggcgcagagcaagttgttgctgcagtggagggtaaataatgtcgattttaatcaataagaataccaaagttatctgccagggtttcaccggtagccagggtactttccactccgagcaggcgattgcctacggaacacagatggttggcggcgtaacgccaggcaaaggcggcaccgagcatctgggtctgccagtgttcaacaccgtgcgtgaagccgtagaaacaacaggcgcaacagcctctgttatctatgttccagcgccattctgtaaagactcgatcctagaagctatcgacgcaggcatccagcttattatctgtatcactgaaggcatcccaacgctggatatgctggtggtgaaagtgaagcttgagcagactggcgtgcgcatgataggtcctaactgcccaggcgttatcaccccgggtgagtgcaaaatcggcatccagcctggccacattcacaagccgggcaaagtggggatcgtttcccgttctggtacgctgacttatgaagcggttaagcagactaccgactatggctttggtcagtctacctgcgtcggtatcggcggtgacccgatcccgggttcaagcttcatcgatatcctgaaactgttccaggaagacaagcagactgaagtgatcgttatgatcggcgagataggcggtaacgcagaagaagaagcggctgcctacatcaaagagcacgtaaccaagccggttgtgggctacattgcgggcgtcactgcgcctaaaggcaagcgtatgggccatgcgggtgccatcattgccggtggtaaaggcactgcggatgacaaatttgcagcgctggaagcggccggtgttaaaactgttcgcagcctggcagacatcggcaacgccgtgaagtcagtattgcctccgcagtaattttatccctttgagcatcaatgccgccctgggcggcattttttttgccaatgataatgaataatatcctgccttattattcattattgctgtcttattcctgttgttatttttatcttatatttacaaataattaatccctttcttgatctggatcaaagtttttatttgatttaaaaatagataaaacatccgaatttattattgttaatttttaaaataccgaattacatctatttaacaggcggtatttgaaataaaaacaaattatcaccttgttaacacaggaatgaattaagattaaatattttctgattacgctggaaatagcgactcaaaaggattaaattgctctggatcaatcttggcctgagtttgaaaaaatgatagtaattgatctacattctaaaaattggcgctggcgcacaaaacacctgtttattgtgtgggaatagtggcgtaacattgtcacaatcaaagctcaggtttaataaaccggctgggggccctgaccccgtcacttctcttccttagagtcccgccccagctgcgcacgcagcgggcgtaggtctgggcatcgttaaatgaaatgaattttatccgatagggaaagttaataaatctctatcacattaaagattcatcatattaaggatccgttaatttttaaaataattaatctgctaattaaataattaaagtcattttgataacggaaagttaaatactggtagttgtgaggcgtattccagttttatacgtcagagagttgctatttggagtcttcctccgaggagctaggggttagaatgtttgatatcgttgagctgtcgcgtttgcagtttgctttaacggccatgtaccattttatttttgttccattaacgctgggtatggcgtttctgctggcaataatggaaacggtctatgtgctttccggcaaacaaatctataaggatatgaccaagttctggggcaagttatttgcgattaactttgcgctgggtgtggccacggggttgaccatggagttccagttcggaaccaactggtcttatttctcacactatgtcggtgacatctttggtgctccgctggccatcgaagggctgatggcattcttccttgagtcaacgctggtcgggctcttcttcttcgggtgggaccgcctctccaaagtgcagcatatgacggtgacctggtttgtggctcttggctcaaacctctcggcgctgtggatcctcgttgccaacggctggatgcaaaacccggtagcctccgaattcaactacgaaaccatgcgtatggagatggtcagtttttcccaactggtgctcaacccggttgcgcaggttaaattcgtgcataccgtggccgcgggctacgtgaccggcgcgatattcattctggcgattagctcctactacctgcttaaaggccgtgatacggcgtttgccaaacgctcgttcgccatcgcggcgagttttggtctggcggctacgctttcggtcatcgtgctgggtgacgagtcaggctacgaaatgggcgacgtgcagaaaaccaagctggccgccatcgaagccgagtgggagacacagcccgcaccggctaactttacgctgatcggattacctaaccaggacaaaatggagaaccaatactccattcagattccctatctgctcggtctgattgctacgcgttcaaccgatacgccggtcaccggcctgaaagagctaatggcacagcatcaagtgcgtattagaaacggtatcaaggcctacacactgctcgaagagttgcgctcgggcaatgacagtcctcaggtacgcagcgacttcgaaaaagccaaggttgacctcggctacggcatgctgttgaaacgctacacgccgaaggtaacggacgcgaccgaagcgcagatccagcaggccaccaaagattcaattccgcgcgtgctgccgctgtattttgccttccgcattatggtggccgcaggcttcctaattttgctggtggtcggtctgtcgttcctgaccgtgctacgccgcaagatagggcagaagcgctggctgcatcgcgcggcactttatgcgctgccgctgccgtggattgccgtcgaggcggggtggtttgttgctgagtatggccgccagccgtgggctatcggtgagattctgccgactgcggttgccaactcttcattaactgccgctgacgtactcacctcgatgatcctcatctgtggtctgtacacgctgttcctgattgccgagatgtacctgatgttcaagtttgcgcgtctggggccaagcagtcttaagaccggtcgttatcattttgaacagcctgccgccgccgttcagcgtgcacagtaagagggagaccacgtatgttcgactatgaagttttaaggttcatctggtgggtgctgataggcgtgctgtttattggcttcgccgtcaccgatggctttgatatgggcgtaggcattctggtgcgcattatcggcaaaaccgacaccgatcgccgcgtgatgattaacgcgattgctccccactgggacggcaatcaggtgtggctgataactgccgggggagcactgttcgccgcttggccgatggtctacgccgcagcattctcgggattttatgccgcgatgatcttggtactttgtgccttgttcttccgcccgctgggctttgactatcgtagcaaggttgacgatcgtcgctggcgcaatctgtgggactggggcattttcatcggcagcttcgtgccggccgtagtctttggggtagccttcggcaacctgcttcagggcgtacctttccacattgatgaatatctgcgtctgttctacaccggtaacctgcttcagctgctcaatccgtttggcctgctggcgggtattgtcagcctgaccatgctggtgacgcagggggcaacctacctgcagatgcgaaccgtgggtgaactgcatctgcgtacccgaacagccgcgcagatttcggcgctggtgatgatgattgctttcctgatagccggcgtctggttggtgaaaggcattgacggttatgtggtgacctcggcaattaacaccgccgccgagtctaacccattgcgtaaaacggtcgcgcatcaggccggtgcatggttgcttaacttcaaccgcatgcctgcactatgggccattccggcactgggcgtcattttacctttattaacccttctactgtcgaggttgaataagggggcatgggcgttcctgacatcgtcgctcaccatcgcctgtgtgatcctgacgacgggcatcacaatgttcccattcgtgatgccttcgagcattgaaccgagcgcaagcctcacgatgtgggatgccacttccagcctgctgacgctgaaagtcatgaccgtggtcgcctgcattttcgtgccgatcgtccttatctacaccagttgggcttactacaaaatgtttggtcgcctcgataaaaactttatcgaaaacaacaagcattcgctgtactaatcgcaaccaaaggggagtttaacaccatgtggtattttgcctggatactcggaacgctgctggcctgctcagcggggatcatcaccgcgttagcgttcgaacaaagtgaagaaagcaaagcggctaaagacgcagaataacgcgttacgcattgtctaatttaagtgttttgaacagtaagggcccgagtgggcccttttgtttatacaccgttgaaactcgcttttttttacatgatttacaaagcgctgacacagttatttcaatgcaccatcacggctcataattattttcattccagagttgcaacccattccaaacctgaaatcagttgcgtatagtagggccgtcaaattgcaatacgggatgtagagtgagtaattcgttgttccgatggcctgtccgtgtttattacgaagacaccgatgcaggcggcgtggtttatcacgcccgttacgtcgccttttttgaaagggctcgcacagaaatgttgcgtgatcgcaactttcaccagcataaattgctggaagaacatgtcgcttttgctgttcgccgtatgacggttgaatatctggcgcctgcacgtcttgacgacctgctggaagtccagagcgaaatcaccgaaatccggggagcttcacttacctttgcacaacgaattcttgattcgcatggaaatcttctgagtagtgcagaagttcttattgcatgcatcgatccacatcaaatgaagccaagagcgcttcctaagtctattgtcgcggagtttaagcagtgactgacatgaacattattgatttatttttaaaggccagcatcctggttaagctgatcatgcttatcctgatctgtttttctgttgcctcatgggccatcatcattcagcgcaccaaggtgctgaatgcggcaacccgtgaagcggaagcatttgaagataaattctggtctggcattgagctttctcgtctttatcaggaaagccagggccgtcgcgacacgctgagcggtgctgagcagatctttcattccggtttcaaagagtttgctcgtttgcatcgcgcaaacagtcacgcgccagaatcggttatcgaaggttcttcacgcgccatgcgtatctcctttaaccgcgagcttgaagcgttggaaaaccatattccattccttggctcagtcggttctatcagcccatatatcggcctgtttggtacggtgtgggggatcatgaacgccttcatcggcttgggcgcggtcaaacaggctacgctgcagatggttgcgcctggtatctctgaagcgctgatcgccaccgcactcggtttgtttgccgctattcctgctgttatggcctacaaccgccttagccaacgcgttaacaaactcgagcaaaattacgataacttcatcgaagagttcacggctatcctgcaccgccaggctttctctcgcgagagcagtaattaagggaggggagtatggctcgagtacgaggtcgtaaacgtcgcgaactgaagtcggaaatcaacatcgttccactgctcgacgtgttgctggtgctgttgctcgttttcatggcaacggcgcctatcatcacgcagagcgttgaggtggacttgcctgatgcgaccgactccaaaacagtttctaccgatgataacccgccggttatcgtcgaggtttctggcgttggccaatacaccattgttatagaccatcaaagaatggaacagctgccggagcagcaggttatcgcggaggcgtcgcaacgcatccaggctaatccgaaaaccgttttcctgatcggtggagcaaaacaggtgccttatgatgagataatcaaggcgctgaatttgctgcatcaggctggtgtgaaatctgtaggtttgatgacacagccaatctgatccatggctaatgggtgacatttattttaaacctggtggatgtacgttaataaaaagcgtgtgccaccgggctttagcaatcctgtgttgggaaatctattttggtaaaggcaactgcaactgaacaaaacgataagctcaaacgcgccgttattgtttcggtcgttctgcatatcatattgatagccctgttggtctggagttctcttcacgaggacaccagtatgagcggcggcggtggcggtactgatatttcggccgtgatggtcgattctggcgcagtggtcgagcaatacaatcgcgagcaacagcagcaggctgacgcgaaccgcgcccagcaatcgcatcagaaaaagtctgaacagcaggctgaagaagccaaagaagcggccgaagaggctaagcagcaaaaggctgaagaggccaaagaagccgctgagtcagccaaacaggctgcacagcagcagaaggctgagcaagccaaagaggctgccgaagctgccaagcaagcggcgcaagaacagaaacaggctgctgctgagcaggctaaacaagccgccgagcaacagaagaaagccgcagctgaagaggccaaacaggccgcagaagatgcaaaacaggctgccgctgatgccaaagccgccgcagtgaaagaacaacagaagcaggcagcagatgctgctgcgaaggctaaggccgaagccgacaaagtggcaaaagctcaggctgatgcgcagaagaaagctgaagctgaagccaagaaacaggcagaggccgatgccgctgctgcggccgtagccaagaagcaggcacaggcagaagccaagaaagcggctgctgacgccgagaagaaggccgcagctgaagaagcgaagcaggccgccgccgaggcgaaagccgcagaagctaaacaggccgcagaggccaaagcggctgaagcgaaagaggctgccgaagcgaaagctgctgccgcaaaagaagctaaagccgccgcagccaaggaagccgccgccgagaaggccgcagctgccaaggccgcagcagatgccaagaagaaagccgctgccgctgcggcgaagcagtctgcagacgtcgacgacctgtttggtggccttgcctcctccaaaaacgcacctaagggtggcggtggagccgctggtgtaggtaaaaataagaagagcggggcatcgggcgcggacatttccaactatgctggtcaggttgaagccgcaatcaagagccgtttctatgactaccagtcatacatcggcaaaacctgttcgttacgcatcaagctcgcaccgaatggtacgttgctagatattcagtctgagggcggcgatccggctctgtgtcaggcagcgattgcagcggctcgacaggcaaggatcccaaaaccaccgtctcaggatgtttatgaagtgtttaaaaatgcaccggtagactttaagcctcagtaatggggcctaaaatggccaaagttattgaagtcgcagttgaaaatattcttgtttaagatatttgcgatggcttatctggtgtttatgtagttttgtgtgcattggtttgttaaaattctgctagtttatcgcggaaagaataagccggtcagacgtcgtggctcgcaggtgtcgggcagtgtaaagcagcaggaaaccgtgcattcccaacatggaaaattgggaaatcgatgcgcggtcttctgccgtttgtgacgccacctgacgaggcgtaagatttctttcgggctctgagtccagataagggagatacaatgaaacaggcaattcgagtagcgttcggcctattgatgatgtgggcgacggtgtctcatgcggaagtgcgcatcgagataacccaaggggtagactctgcccgcccaattgcagtagtaccttttaaatgggctggtccggggactcctccacaggatatcggcggcatcgttgcggctgacctgcgcaacagcggcaaatttaatcctatcgacaacgcacgtatgccacagcaaccgagcacagcggctgaagttacgcctgctgcctggagcgcgttgggcatcaatgacgtggttgttggtcaaattcagcctggcggtgacggcagctatctggtgtcttatcagctggttgacacctcgggtgcaagcggaaccgttctggcacagaaccaatacaaaatcaccaaagagtggctgcgttatgcagcacataccgcgagtgatgaagtattccagaagctgaccggaattaaaggcgcattccgcacccgtatcgcgtatgtcgtgcagaccaacggcgggaaattcccgtttgaactgcaagtctctgactatgacggctacaatcagtttgtcgtgcaccgttcgaccgagcctttgatgtcaccggcctggtctccagacggtagcaaactggcttacgtaacttttgaaagcggtcagtctgctctggtgattcagaccctggctaacggcgcaatccgtcaagtcgctgacttcccgcgtcataacggtgcacccgcgttttctccagacggtaccaaactggcgatggccttgtctaaatcaggcagcctgaacctgtatgtaatgaatttagcttctggccaaatcagccaggtcactgacggacgcagcaacagcactgagccaacctggttcccagatagtcaaaatctggcgtttacctcggatcagggtggtcgtcctcagttgtataaagtaaatattaatggcggtgcgcctcagcgtctgacgtgggaaggttctcagaaccagaactcagatgttagccccgatggaaaattccttgtaatggttagttccgcaaacggtagccaacacatcgccaaacaagatctggacacgggagccgttcaagtattaacggacacgtacctggatgaaacgcctagtatcgcgccgaacggcaccatggttatctacagttcttctcaaggactcgggcaggtgttgaatttggtctcgactgatgggcgtttcaaagcgcgtcttccggctaccgaaggacaggtatcttctcctgcctggtcgccgtacctgtgatgcatgttaagatatgtatggcaaattataaaaaaggatcaacgagatgcaacttaataaagtgctgaaaggcctgctgttggcagtacctgtaatggcaatcgctgcttgtagttcacacaaaaccgcagacaatggccaagctggatacggcgctaacggtgctggtactggcactgaaaacggcaatatgtcttcagaagaacaagctcgccagcaaatgcaagagctgcagaagaacaacatcgtttacttcggtctggacaagtatgatgtttcttctgactacgctcagatgctggatgcacacgctgcattcctgcgtagcaacccgtcttacaaagtgactgttgaaggtaacgccgacgaacgtggcacacctgaatacaacatcgcactgggcgagcgtcgtgcttctgcagttaaaatgtacctgcagggtaaaggcgtttctgctgaccagatctctatcgtttcttacggtaaagaaaaaccagctgtactgggtcatgacgaagcggcttacgctaaaaaccgtcgtgccgtactggtttactaagagaatcgcatgagcagtaacttcagacatcacctgttgagtctgtcgttactgattggcgtagcggccccttgggccgctactgcctcggcaccaatcagtaatgtcggctccggctcgatagaagatcgagtcaccacccttgagcgtatctctaacggtcaaggccagctattaactcaacttcagcaacaagtctccgataaccagaatgatattgcgacgctccgtgggcaaatccaggacagccaatatcagctgaagcagattaccgatcgtcaaaaccagattctccagcagatagcttcgatgcaaagctcaggtagtgcccctgcggccgctgcaggtgcttcagcaggtgcagcaacggctgacagcggttctgactctgcttctgctagcagcgcgcctgcaagctcggggaatccggacactgactacaacaacgctgtatcattagcgttggaaaagaaacagcccgatcaggcaattactgccttccaggcttttatcaagcaatacccggattcgacttaccagcctaatgccaattattggctcggccagttgtattacaacaagggtaagaaagatgacgcagcgtactattttgcggtagtggtcaaaaactatccgaagtcgccgaaaagcccagacgcgatgtacaaggtagggatcatcatgcaggagaaaggccagagcgaaaaagcgaaagccgtgttccagcaagtggttaaacaatacccgaacaccgaatctgcgcgagcggctcaaaaacgtttgtcttcaaaatagttagccattcaggcccgaaaaataaccatttagactatttttcgggctcgagtgtatgaagaacaagcagtcagtaagttatctcgaaattagggttgcgctgccgagataaatcagtaatatatgccgccgttgcccagacaaactgaaacaagttaatcaggcaagcaaattaagcagattagtgggtcgttagctcagttggtagagcagttgacttttaatcaattggtcgcaggttcgaatcccgcacgacccaccactgtttaatgctgtagtaaatgtgttaagtcgtaggtaagagaacctgtagcaggttcgagccgagcggagcgagacgacaacgcgaacgcgttgcccgaagggtgaggccagaggccgaatcaatcccgcacgacccaccactgtttggtttcgataggttttaagcagtaaaatttgtaagcagtaaacagagggtcgttagctcagttggtagagcagttgacttttaatcaattggtcgcaggttcgaatcccgcacgacccaccactgtttaatgttgtagtaaatgtgttaagtcgtaggtaagagaacctgtagcaggttcgagccgagcggagcgagacgacaacgcgaacgcgttgcccgaagggtgaggccagaggccgaatcaatcccgcacgacccaccactgtttaatgttgtagtaagaagtcagtcagttagaagagggtcgttagctcagttggtagagcagttgacttttaatcaattggtcgcaggttcgaatcccgcacgacccaccacttctaagaaaaaagcgcctaacgggcgttttttgcgtttcagggtctgcgaaattgttccatagctctaaagcagcagatctcgcgcgtcgtgtgggtgagaagttgcgttctggttcgagccgagcgaagcgagacgacaacgcgaacgcgttgcccgcagggtgaggccaaaggccgaatcaatcccgcacgacccaccacttctaagaaaaaagcgcctaacgggcgttttttgcgtttcagggtctgcgaaattgttccatagctctaaagcagcagatctcgcgcgtcgtgtgggtgagaagctgcgttctggttcgagccgagcgaagcgagacgacaacgcgaacgcgttgcccgcagggtgaggccaaaggccgaatcaatcccgcacgacccaccacttctaagaaaaaagcgcctaacgggcgttttttgcgtttcagggtctgcgaaattgttccatagctctaaagcagcagatcccgcgcgtcgtgtgggtgagaagctgcgttcaggttcgagccgagcgaagcgagacgacaacgcgaacgcgttgcgcctactggtcattggcccagaccgacacaagaggaattcaagaccattccctttgtgaatcctcctccttgttatcttgagatgactgaggcagaaggatgagtacgtttcagttacgacttcgcctggcgcaggtcgcgccgcttcgctgtcccttcactgcggattcggaataacatcgttcctcatcacttcgttctgcgccgccctgataccgtcaatatgagtatcaaaccaaaagcggcaaccttgagctcaagtccacgatccttcaaacttcacaacccgaatatgcgaatcacgataataaatcgtcacttcatttgttaaattttaagccgcttaaacaaaatcacgaattagcataaaattacagcgacatttatctgtcatcggagtattttgtttagcatataaaacaaacgggcttcttgaaggctcgatccgatgatttgccggcatattgacggctgactgagatgatgagtaatgagtgagacactggacctgaacgcggcggtttttcctttccctcctaaacccgcctctttgagcgacgacgagaaaaccttttataaagaaaagattaaaaggctccttaaacagcgtgatgcggtgatggtcgctcattactatactgaccccgagattcaggcgctggcagaagagaccggtggctgcgtggccgactcgctcgagatggcgcgtttcggcagtcaacacagtgcctcaacgctgctggtcgctggcgtgcgtttcatgggcgaaacggcaaaaatcctcagtcccgagaaaaccgtgctgatgccgacactgcatgccgaatgctcactggatctcggctgccccgaaaaagagttctccgacttttgcgacaaccatcccgacagaacggtcgtcgtttatgccaacacctctgccgcagtgaaagcacgcgccgactgggtggtcacctccagtattgccgtcgaacttattgaacaccttgatagtcttggcgaaaaaatcatctgggctcccgatcgtcatctcggaaattacgttcgcaaacagaccggggcagatatcctgtgctggcaagggcctgtatcgtccatgacgagtttaaaacccaagccctgacccgcatgaaagctttataccctgaagcggccgtgctggtgcatccagagtcccctcaggcgatcgtagacatggccgatgccgtcggatcaaccagccagctgattcaggcggccaaatcgctgcctaacagtaagcttatcgtcgccaccgatcgcggtatcttctacaagatgcagcaggcgtgtccagacaaagagctgtttgccgcaccgactgccggtgaaggggcaagctgtcgtacctgtgcacattgtccgtggatggcgatgaacggcctgaaggcgattgcagaagggttggagcagggggaagtcagcacgagatacaggttgaggaagcgctgcgagttaaatcgttaattccgctaaaccgcatgctggactttgcggcccagctcaagctgcgcgttcagggcaacgcctgaacgcgctaaccctttagtgatgatgcccgtggtcatgaccgtgatgatggtgatgaccctgtcctgacgcggctgaaatcgccgctgcatcgtttaaggtgcagtcatacatttcgcagacgccatactctatctgaattgtcgcatgaccaattttgtatttctcggacaggtagtgctggatcctgcccagcagcgcatcgtggtcatgcggtggaatcacctgcgtatgcagagtcatcagacgctgttcgccaatctgccatacgtggacgtgatgaacgttgcgcacctcgggaatagttagcgaaaggtccttacgcagtttatcgatatcaatctcctgcggcgtgccttccagcagctcgtgaaagctctcacgcagcagccccaggcattgcgcagcaccagacaggacaccagtaccgacaggattgggtcgataggcgtccagccggtgtacatgataatcagggctgcccctaccgcaccgacagatcccagcaagtcccccattacgtgaagtgccgcggcacgcacgttgatattccccttttcctcaccctgatgcagcagccagaaggccagcaggttagcgaacagcccggcaatggcgattgccagcatggtgccgcccagtactggctccggcgtcataaaacgacggatggcctcccagaggatgagcacgacaataagcagcaacgcagaggcgttaacgaacgctgccatagtggtcaagcgaagataaccgaaggtgtgacgagcattggctttgcggcgggcaaagcgaaccgccgttagcgccatgagcagcgcggctgcgtcggtcagcatgtggccggcatcggccagcagagcaagcgagccggaaatcataccgccaataacttcggccaccataaagaccacggtaactaaaaatgccaacagcaaacgacggctgtttctgtcctcgggtaaaagagaccgtactgacataattttccctatctgtttttaatattgatataccacgaatgtggttcagcgctttatttactgaaactagtctgaataacttcctattttaagtcatcttttaccacaaataaaaacggagagcctaagccctccgtccgaatcaaaccggcaaaactatttacccgtgtcggcggactgttttgtccccggcgtttggtcgggacaacgaccgtctttacacatggtaattttatggtctttgtttttgctggtttttttatgcatcttggtcgttttcttgtgatgcgtcattggtttttgtgcagtattggtatcagaagtattgatcttgctgttatcaacgccgtttggcgcaagtttttgcatcgatcccggtccgcctgtctgattagcgttaccattattggatccagcaccagcattagacccgtccgctgcaaatgtcgcaccgctgcccagagccagacctgctgtaagaagaattatcgcgagctttttcatgtcctagcctccatttcaggtttgtattgagaaatcatctaaattttgcaaatggttatcaatataaaagcttagttgaggttcaggtcatagcaatgagataaatgcccattaatggccgaaagtcgatttacagcgctgcgcaatgccgctagattggtcgcgtttggaaattagtttcgaccttttatgaaatacccaatggaacagttatgaattatcaaaacgacgatttacgcattaaagaaattaaggaacttttaccgccggtggcattgttggaaaaatttcccgccactgataaagccgctaaaacggtttcccaggcgcgcaatgctatccataagatattgaagggtaatgacgatcgtctgttggtggtaattggtccctgttccattcatgaccccaaagcggcaaaagagtatgcagcacgtcttctgacgctgcgtgaagagctgcgcgactccctcgaaatcgtgatgcgtgtttacttcgaaaaaccgcgcaccaccgtaggctggaaaggcctgattaacgatccgcaaatgaacaacagtttccagattaacgacggtctccgcatcgcacgtaaattgttgctggatattaatgacaccggtttacctgcggcaggcgagtttctggacatgatcacgccacagtacctggctgacttaatgagctggggcgctatcggtgctcgtactaccgagtctcaggttcaccgcgagctggcctctggcctgtcttgcccggtcggctttaaaaacggtaccgacggcaccattaaagtggctatcgacgccatcaacgccgctggcgcgccacactgcttcctgtccgtaactaaatacggccactccgctatcgtgaacaccgcaggtaacagcgactgccacatcattctgcgcggggcaaaaagcctaactacagcgccgctgacgtgaaagaagtcaaagacggcctgaagaagggcggtttgcctgctcagatcatgattgacttcagccacgccaacagcagcaaacagttcaagaagcagatggaagtctgcgaagacgtctgtggtcagattaccagcggcgaacacgctatcatgggcgtcatggtggaaagtcaccttgtcgaagggagccagagtctcgacaccggggagccactggtttacggccagagcgtgaccgacgcctgtatcggttgggaagacaccgagaccctgctgcgcagcctggctggcgcggtgcaaaagcgtcgcggttaagttgatttcgccgacctttggggtcggcaaattcagcgtagcgtggggatttttccaacaataaaaaatgccacccataaaaaaagaacgccgaggcgttcttttttcgtttcagtaccggactgaattacttggctttaccctgattagcaaccgcggcagcttttgcagcgatttcttcagcgttgcccaggtagtagtgtttgatgggtttgaagttttcgtcaaactcatacaccagtggcacaccggtagggatgttcagctcaagaatttcttcttcgctgaggtcgtcaaggtatttcaccaaagcacgcagtgagttaccgtgcgctgcaataataacgcgctcgccgctttcgaggcgtggtttgataacgtcagtccagtaagggataacgcgctcaatggtcagcgccaggctctcggtggttggcagctcttcaggacgcagttttgcataacgcggatcatggcctgggaaacgctcgtcgcttttgtccagctctggcggagttacgcggaagccgcgacgccattgtttgacctgctcatcgccgtatttggccgcggtttctgctttgtcgagaccctgcaacgcaccgtagtgacgttcgttcagtttccaggatttttcaaccggcagccacggctggtccagttcatccaaaacgctccacagagtatggatggcacgtttcagtacagacgtgtaagcgaaatcaaactggaagccttcatctttaagcagttgtcctgcctgttttgcttcagtacgacctttatccgaaagatcaacatcatgccaaccggtaaaacggttttcttggttccattgactttcgccgtgtcttacaagaaccagcttggttacagccatagctaaactcctcaatttactgaaattccaatgacaactgcgatcattatatggcctgacccctgcgtcggcaatcaataaacgaaacgcacagccccaagtttgaggctgtgcgttaacgggagtttgctttacttctgattacgcagcttttttcaaacatgtgctcataaaggtcttacgggcatcacctttgagctcttttttcgcagcatctgcattacaagtcttcatcttgttttgctgtggagtcatcgctttatcactggttttagcctctgctttcagacagtggctcatgaaagtcttgcgctcgtctcccttaagactctgcgtggttgcctgctggttgcagtcggtcattttctgacgttgtgcagcctgtgccgcagaaggtgccttcatggcctcggcggccagtgcattacccccaatacaaagcgttgctaacagcgacaacaaaattggtaaacgcataactcattccttttaagacgtcctgctcaccaggacactctgtaagagtagatgtaacaagtgtttttggctgaataaatccccaacccgtgaggatagatatcacatttttagctaaatgatcgagccgccatgatcggtaacacctcaattcccgctaatttctgaaaacttacgaaaaaattaccttaaatcatggaacctaccgaaagttgaatgttgacataaatagatatgataattattatcattcctattatcaattatgactattttaaatcctgattaataacagggtcttgccgtgcattttttttggaaattcattgctgagcaacataataatcttaaattctctaaggcctttttatgtctccacacaagggaacgcgtcaccttaagactttgctttcgttaagcctggtcgccagttcagtcatgaacgccgttgcagcagaaacggcgacgacaacaccagtggtaaaaaaatcaacggctaacgcggccgatgccggggacgttatgacggttatttctcctaaagttgagagaaaagccggtgacgaaactaaaatcaccgccaaagatatgcagaaagacggcggcaacgacttcggaaccctcatgcgctatcagccgctggtcagtgcgaccggttcagcaggcggttcttcggtgggcaaaagcgggttcgaccgcagcggctacaccggatataacgttcgtggccttgagtcgaatcgcgttgctattgacgttgacggtatctcgcagccaagcgcgacgggccgaccttacgtcggacgtgccgggcagggaaccttcggcatgggccgtgactacatcgacccttacctctatggcgcagtggatatccagtccggagcgaccaacgtctcctatgccaataccgctatcggcgggcggtgtcattcaagccgaaaacggccgatgactatctgagcgaaaacaaacacacttatttcggctatcagagcgactatgactcctcgaaccacagctggcacaacggcatcacggtggcgggtggcgatcgtgatttaagcggcgtagtggtgattagccgtcgtgatggtcaagagacccgcaacaacagcggcactcgtgacgcttatccggcgaactggcactccgatgccatcatggcctcgggaacctgggcggcgaccgacactcataccctgacaggcaccgtcgatctttacgacaagactaaccacacccatttcgattcctggaatagcgcaggttctgcaaccaacggcaccaactaccagactagccagacgcggcgtatcacggcgagcgtgcttgaccactggacgccgtattcgcagctggtggataccatcgacactaaactgttcttccagaaaacgcaggcgcacgacaacacctacggcccgaataccaccaccggtaccagtctggtgcgcaccttctctgacctgaacacccatactttcggcctggatagcaaaatggccaagtcgtggggcatccacgaattcagctggggtctgaacggcaacatcagcgagagcgatcgcccgtttagccagtcaccggtgcagtcgacctacagctacaccatgccaccgcaggccaatagccgtacttatgtcttcggtgcctttgcgcaagacaccatgacgtgggacctcgacgggcataacttctcggtggtgccgggcctgcgcctggcgtatcagaagaccgagccgaaagatctgggcacgctggccaacggctcgctgtccgaatcagaactttcgacgctgtacggcaccaccagcgatacccaactgctgccgtctctggcctttatctatgacatcacgccgaaagtgcagacctatctgcaatacaaacgcggcgcgcagttcccggacgccagccagctttacggctcatggaacctgagctcaagctatgccggtagctcgcagtatgcgttgatcggtaattcggatctcaagaccgaaaccagcaacaactacgaatggggcatcaaaggcgaagcgacaccagggataacctttaacctgaatgcgttctacagccagtacaaaaacttcattgcttacacgcgctacacccgttcgggaagcccatcggtcttcaccaatattccaggcaatatctatattgcctatgaagctgaaaaccgcgacaaagcttacatttacggcagctctttgactgcacgatttaacttcggtacctggtatgagcaggtcaatggcctgagtgcgcgcctgtcgttcggctatgccaagggcgcgtccaaatccagctatgaaggcgataagtacgtcgacctcgacagcgtggcgccaatgaaactcgtgaccggtgtggcgtgggacgatccgtcgaagctttacggggtagccgtgacagcgaccttcaacaaaggcaagcaggcgaccgcaactaaccgcgaaacctacaccaatgcaggcaccgctatcaccgattcctccacggaatacgcgcgtattcccggctacggtatcgttgacctgaccggttactatcaggtggcaaaaaacgtcaaactcagcggcggtatctataacgtgaccgacagaaagtactgggactacctgagcacgcgtgacactgagacctcaacggctcaggataaggccgatctcgccctggcaacgatgccgggcagaaccttccaactgggggtcaacgttgacttctaatggtctgaataggttagggtaatagtaaaagccgggataatccccggcttatttttaatctcgaagtccgcaatgtaaaagggccatccgcattatgccgatggcccttttttatgcagcagcgttagagttaaagtgcaaagaactggtaaaccgtggccgagcggtaggtctgacccggttttatccagcaacttggctgcggccaggtcgagtgattgggactgtccggcaggaactcgctctcgagcgccacgccgctgtagttggcgtactgcccacccgtgcggtttggcgtaccgttgaggaagttaccggtgtagagctgcagggctggggccgaagtaaagaccgtcatcttgaccttgttatcggaagaccacagattagccgccggattgtcgctcgcattacaggtggcatacagtaggtacgcgtggtcatagcccttaacgcgctgctggtcgcgatccttgaggaagtcctgcgcgagcgttttcggcgtgcggaaatccatgccggtctgctgcaccgaggtgagatctgcacagggaataccgtcgctgtcgataggcaggaaacgttcggcaaacagctgaagtctgtgtttgcggacgtcatgcccctcgccgtcgagattgaaataggcgtgattggtcagattgaccggacacagcttatcaacctgtgccttatagctgatttcaagacggttatcgtcggtcagcacgtagtggacctccgccgtcaattccccggatacccctgatcgccgtccggcgacaccagctggaaactgactttctgctcagtgtagttaaggattttccaacgacgagcgttgaacccttccggtccaccgtgcagctggtggacgccctgattggcgaccagcagatggggtttacagtcaatttgaaattgcgaacgcgcgatacggttggcataacggccgaccgttgcgcccagataggcgctctggttgacatactcttccgggctttggcagcccagcagcagctcgcggcgttcgccatccgccaaaggcaggacgaaagacaaccaggtcgcaccccaatccataaaggtagccgttgtccccgcagggtttttaagcgtaaccaactgaaaaggcgagccgtctggggctcgctgggtgctgactggcgttaacatacgctggctccttccgaggcatggcagacgtagaacgtctctttaatcccggttttggcgtgatattcgtgttccacggttttacgcaccttttcgaccagctcgcttggtatcagggcgacgatgcagccgccgaaaccgccgccggtcatacgcacgccgccacgatcgccgatcaccgatttaacaatctcgaccagcgtgtcgataggcggaacggtaatttcgaaatcgtcgcgcattgaggcatgagactcggccatcagcaggcccatttttttcaggtcgccgtggctcaacgcgatagccgcggcctcggtacggtcgttttcagtaatgacgtggcgcgcacggcgagcggtcatcggatccagaccttgttccttttcggcgaactctgcgaggttgacatcacgcagcgccttcacgccgaagaagcgcgcagcttcctcacactgtttgcgacgcgtgttgtattcgctgtcgaccagaccgcgtttaacgttagagttaataatcactacggacgcgtctttcggcatcgaaacggctttggtttccagcgaacggcagtcgatcagcagggcgtgatcttccttgcccaatgcggaaatcagctggtccatgatgccgcagttgcagcccacgaactggttttccgcttcctgaccgttgagcgctaactgcacgccgtcgacgggcaggtcatacaggctttttagcgcctggccgacggccacttctagcgaggctgaagagctgaggcctgcaccctgaggcacattgccgctaatcaccatatccgcgccagagaagtcgctgttgcgcagcagcaggtgtttcaccacgccgcgaacgtagttggcccaaggcagcgcgtcggtgctgacaatcgcttcgtcgagcgagaattcgtcctgctggttgtcgtaatcggcggcaatcacgcggatgatgcggtcattgcgttggccgcaggcgatcacggtttcgtaatcgatagcgcagggtaaaacgaaaccgtcgttatagtcggtgtgttcgccaatcaggttcacacggcccggagctttaatggtgatagtggccggatagccaaatgtttcttcaaaaatcttcaaggtcttgtttttcaattccatcattttactccggcctcacgataatgaacgtcactcactgcccgtaggcgctctgcggcctgctcggcggtcaggtcacgttgtgtttcggccagcatttcatagccaaccatgaattttcttaccgtcgctgagcgcagtaacggcggataaaagtgtgcatgcagctgccagtgcgcgtcgttgccttcgcggaaaggtgcgccgtgccagcccattgagtacgggaaagagcactggaacaggttgtcatagcggctggtcaactttttgagcgccagcgccagacaggtacgctgtgcctcatcgagttcggtaaggcgcagcactttcgccttcggcagcagcagggtttcgaaaggccaggcggcccaataagggacaaccgccagccagtgttcggtttcgactaccgtgcggctgccgtcggccagctcacgctgtacgtagtcaagcagcatggaagagccgtgctgcgccatatactgacgctgcaggtggtcttcacgctcggcttcgttcggcaaaaagctgttggcccagatttgaccgtgcgggtgcgggttggaacatcccatcgccgcccccttgttttcaaatacctgaacccagggataagttttgcccaaatcagcactctgttcctgccaggtggtaaccactttctccagcgcctcgagcgacagctgaggcagcgttttgctgtggtctggcgagaagcagataacccgactggtgccgcgcgcgctctgacaacgcatcagcggatcgtcactttctggtgcgaaaggcgtatccggcatcagcgccgcaaaatcgttagtgaaaacgtgcgtgccttggtagtcaggattcacgtcaccggtcacgcgggtattgcccgggcacaggaagcagtcaggatcgtgtgccggcagcgtttcctgcgacggcgtctcctgctgaccttgccatgggcgcttggcccgatgcggactcactaaaatccactgatcgctcagcggattatagcggcggtgcggatgctcttttgggtcaaaactggacattacatttccttagtctggatagccctgtgggttgtttgattgccacagccaggtatcagcagccatatcttccagagtacggctgacgcgccaattcagttctttggcagctttgctcggctcggcccagtaagcaggcagatcgccagcgcggcgtggtgcaaagtgatagttaaccggcttgccgcaggcatctctgaaggcgttgatcacttccagcacgctcttgccgacgccagcgccgaggttatagatatggacgcctggcttgttatgcagcgttttcatcgcggcgaggtggccgtcggccaggtcaaccacgtgaatgtagtcacgcagacaggtaccgtctggcgtgtcgtagtcgttaccgaacactgacagcgagtcgcgacggcctacggcaacctgcgcgataaacggcatcaggttgtttggaatgccctgcgggtcttcgcccattaggccagacgggtgcgcgccgaccgggttgaagtagcgcagtaacgagatgctccagtttggctccgcgcgctgaaggtcctgcagaacctgctcaaccatcagtttgctgcgcccgtaagggctcgacggtgttccggttgggaaatcttcaacgtaaggggtcttaggctgatcgccatacacggtggcggaggagctgaagataaggttggtgacgccagcggcgcgcatcgcttcaaccagcaccagcgagccgtaaacgttgttatcgtagtattccatcggcttgttcaccgactcgccaacggccttcaggccagcgaagtgaatgaccgaatggattgggtgttctttgaagattttgtccagcagggcgcgatcgcggatgtcaccctgatagaggataggggttttacctgtcagagtagtaatgcgttccaaaacgctggctttgctgttgcaaagattgtccagaatgattggctcatagcccgctttgattaattgaacgcaagtgtgactaccaatgtaaccgctaccaccggtaactagaacgtacatatcgactccttgaaggtattgatgttgacaacaatatcatgctgtggcgcgtaaaaaggtgatccatcttataaaatgaaatcgcttacaccccttagtttatcacccccgtaaacctcgcaccaacggggtaaaacggcgtatttttgccaacacaatccttataatacctgaagtgtaatcggttacatcaagtttttttaaatggatattgtcatgcaaggttaattttaggaaaaagattaagaggagttaaggaagctttaggttgcgtctgggctgctaaagcaaggtcgatgggcggccgcccatcgacgagaatagagagtttcagttataccgagcgtgccgccggcagtgtgtcaatctgatagccataaatctctccctcaggcacaaaactcagtcggtgagtgatgcactgcggggcgtcctcggcgtggtgcgagacgaacagcagctgagttttcccttcaccgatcaggacgtcgatgaagcgacgcaccagctggcggttgatggggtcgagaccctgtaaaggctcgtcgagaatcagcagcgcaggatgcttcaccagcgcacgagcgatcagcgccaaacgctgttggcccaggacaagctgtggaacggcgtgtcagccgtgcgtccgccgaggccgagcagttcaagccattgcgtcgtcaactgctgctgtctgtccgacactgcctgataaataccaattgaatcaaagaatcccgacaaaataacgttgcgcacgttcgagcttacgcggtagtcgagatgcaggctgctgctgacgtaaccgatgtgccgcttgatatcccagatggtctcgccgctgccgcgacggcggccaaacagcgttaaatcgttgctgtagccctgcgcgtgatcgccggttatcagactcaacaacgtcgatttgcctgcgccgttttgcccgacaatctgccagtgctggccggggtcaacctgccacgtcagaccgtgcaaaataggcttatcattgtattgcaccacgccgttgcgcagcacaatcagcggctggtcgcgtggaggcgagacgttttgcgtcggatcttcactttcgggaagctgaaggccgctcagcgtttcgctgtgtgccagctgtgcgaccagggcgtcagaaagcacctgctcgcggggccaaccgaggccagtgtgcagtcagccagtacgccaacgtgctgaacaaaggcaggaatatcgtcgaaacggtttaataccagcaccatcgtctgacccttgcccgccaactcggccaaggtgtccgccagctgttcacgcgctttcacgtccagcccgtcgaaaggttcatctaacaccagcaggtccggctgttgcattagcacctgacaaagcagcgtcttgcgggtttcgccggttgagagatatttgaagcgtcgcgtcagcagatgagcgataccgaattgcgtagccaaagcctcgcagcgcgccgcatcatgcacctgctcctgaatgatttcagcggtggtacgaccggtatcgtcttcgtcggcgctgagcatatccgtattgttgcgctgccactcgtcggcaaccagtttttgcagctgttcgaacgacaggcgaaccccgttagaaaactcgctatggcgtgtgccttccagcagcactaaatcaccggcaattgctcgcgccagcgcagactttccgctgccgttggagccaacaaacgcccaggactcccctggcgcagcgtcaactcggaaagtgccagagtgcgcttatcgccaagacggaaaatggcctgtgaaatatttaatgatgacatcttgctcctgcctgcttatcacttggggcggcgcgtggtgacctgcccggaaattcttatctaaagagacctttaagaatttcagggataagcgcatcaccggcccaagtcaattgacaattctgcaaactgtcagcgctgaaaatgcaagatcctgaatattataaattattagcaaagtgtggcgacgatcaccttgtccgcgtcgaactgcgcaaacacctcagcaccttctttgagcttcagttcggcaatctgtgcactggctacggtggcgcataaaatctcaccggcctgtaacgcaatcaaaacctcgctgttgtcatgaccttgttgaatactctgtactttcccggcaagtgcgttatcggtattcgtcgactgatagctcagcgttatccagggtgccttgattaacgcgaggatctctttgcccggcaccaggctcaggcgatcggcgctttgctgggtgagggcggcacgaatccgcgtctttccatcggcaagcaatacgttgatatgctgctgaacctcttcgttatcgcgttcgataacggtgccaaaaagttggttgcgtgcgctggtttgcagtgagaaacgcgagatggccgccagcaaactgtcgagcggcaggccatcatctttaagcacgtcaaaagccttttgctggatttgtgccagcaggtcatagagctgaatcaacctctcgccgtagcgggtcaactgcgcgccgccgccgcctttgccgccagtattgcgttcaaccagcgtctcatccgccagctgattcatctcattaatcgcatcccaggcacttttgtagctgaccccggccagtttggcgccctgacttatcgagccggtcaccttaacctgctttaataattcgatacgacgcggatcggcaaaaatgcgctgttgcagtttcagggttaacaggatttcagcttgcataaataggagtccaaccttggcgtgagcaaaagtcatggtacgaggcatgacctgacaatagacgctattgtcgcccatcgaagtgatttctcaaactgtgttaagagcaggattcgaaaagggggcggtgaaaagctaaagtaattaccccatttcactgttaagattagtaacagttttttgcattcgccttacggcgtgataaacagcagggagaggccagcatgttggaattacttgaaagtttgcttttcgcggcgatcatggtgcctatttttatcgccatcgtacttgggctgatttacggcatgggtgagctgttcaatcttatttctaaaattggtcatccgaaagagtcgcgcagcgaaccaaaagcgtagccccttagctcgcttaactttcactgatcaaaatgcctggccttcgcgccgggctttttttgcatcaatttaggtctgaagatttatgttactgcgtatttccacgttatattgaaccctatacagcggttatccaataaaacaataaggaaagactcgatgcgtattactctgggtaaaggttgggtggcagccgtgctgattgccggtgtattcactcaggcgcaggcggcggagaaaatcaccgtgtttgctgccgcttcgctaacgaacgcgctgcaaaaaattgccgagcagtatcagcagggcaaggaggtgcagattgtttcttcctttgcctcatcgtcgacgctagccaaacagatagagcagggcgctcccgctgacctgtttatttccgctgaccagcagtggatggattacgctatcggcaaacagctgatggtaaataacacccgctacaccttgctcggcaacgacctggtgttggtcgccgccgctgacggtaaacagcaaaaaattgatatcaacaagcagacgccgtggctttcattgctcaacggcggtcgtttggccgtcggtgaccctgcacacgtgcccgcgggaatttacgctaaagaggcgttgcaaaacttgggtgcctggagcgccgtcgaacctacactcgctccggccagtgacgtacgcggcgcgttggcgctggtggagcgtcaggaggcccctttgggcattgtctacggctctgacgccgtcgccagcagcaaggtaaaagttgtcggcgtgttccctgagtccagccacaagccggtcgaatatccgatggcggtggtaaaaggccacgagagtgcggcgctcaccgccttctatgactacctgaaaacgcctgccgccagcgcggtattcaaacagtatggatttacgccgcgcggatgatactaagcgactatgaatggcaggcagtgatgctaagcatcaaggtgtccagccttgccgtggtgctgagcctgccgctggggatcctgatggcctggatcctcgtccgctgccgtttccccggtaaatcactgctcgacagcgtaatccatctgccgttggtgttaccccggtggtcatcggctatttgctgctggtggtgatgggacgtaaagggtggctaggcgcgtggctgtatgactggtttggcttcagcgtcagttttagctggaaaggggcggtgcttgcctcggcggtgatggcctttcccttgatggtgcgtgcgattcgccagtctctcgaggcgattgatactcgtctcgagcaggcggcaagaacgctcggtgcctcgccgctcaaggtgttttttaccctcacactgccgctgtcgctgcccggaattatcgtcggcgtggtgctggcgtttgctcgttcactgggtgaatttggcgcgaccatcacctttgtgtccaatatccccggtgaaacgcgcactatcccgttggcgatgtacaccctgattcaaactccgggtgcagaggggcggccgcgcgcctctgcgtactggcaatactgttgtcgctggcggcattgctgatttccgacctgcttgcgcggcacagccgtaagcgtctgggggctgatgctcaaattggattttgcccaacggcttggtgacttgtcgctcgaggtaaaggttgacctgcccgagcgcggcattaccgctatctttggcctttccggcgccggaaaaacctcattaattaatgccatagcggggttgacccgtcccgactgcggcgtaatcaccttgaataaccgcgtgctgtcgaagggggagatgcctcgtcaaaggccgtttttcttccgcccgaaaaacggcgtatcggctacgtgtttcaggacgcacggctgtttccgcactacaaggtgcgcggcaatctgcagtacggcatggtgcccgcgatgcgtgagcagttcgagagtatcattcaactgctcggcgtcgaatctctgctcgatcgctatcctttgacgctctcgggcggtgaaaagcagcgggtggctctcggacgcgcattgttgagcggtcctgagctgttgttgatggatgaacctttagcggcgctggacctgccgcgcaagcgcgaactgatgccctatctggagcggctggcgcagcaggtgaacattcctattctctatgttacccacagtctggacgagatcctgagtctggccgagaaagtcctgatactcgagcagggcaaggtgctggccttcggtgacgtcgaagaggtgtggtccagcagcgtgatgcgtccgtggctacggcgcgaagagcaaagcagcgtattgaatgtgaaggtgctggagccgcatccgcattacgccatgaccgcgctggcgctgggtgatgagaagctgtggatcaaccgcgttgaggtgccgtcaggcacggctatgcgtattcgtgtgcaggccgccgatgtctcgctggtgctgcaacccacgcccggaaacagcagcattcgcaacgtattgccggccgtggtcgaggagctgctggagaacccgcaggcgatagacgtcaaactttccgtcggcggccacatactgtgggctaaaattaccccgtgggcgcgcgatgaactaggcatccaccctggacaacgcgtgtttgcacaaatcaaaagcgtgtcgctgagtcgagggtgaacaagccgtttttaaaatgaaacttggcgctgattgatgcgagcgttttatggacgacaaccggtgaatagcccgctctcaatatcgcgggctttgtttattcaaagcaccttgctgcgaatcacctcggcgataccgggttgttcgttatcggcaataaccaggcccgcgcgggctttgatagcctcatcggcattgcccatcgctacacctaaaccgacattttccaacatgctcaggtcgttatagttgtcaccgaaggcgataacgtcggacatgctcatcccctgcgactctacccactcctgcagacgacgtcctttgctgttgccgcccttggcgacgtcaacctggtcgtgccatgaccattcacaggccagcccaagctcttgctcggcctgctgcgcaaaggcgtgcagcgcatcgaggtcgtggtgcgaggtggcgaatttccacagggagttcgcttcgtcggcggcgtcgcgcaggctgttgacctgaatgagggttggacggaggccctcaggcagcgttttgccccaggcaatcgagcgctcgacgtggccgttaggctgctggtaaagcatggcatcatcgacatacagcaggccgtggatgccgtaaaactcgagcaggtcgacgactttcttggctttagctttatccagtggatccgaactgattacctttttatccttaaaatcatacagataggtgccattacagcagatggccgcggtatcgagtcctagctcatgatgaaacgacttgatagccacgtgatgacggccggtcgcgataaccactttaaccccagcggcccgcgcatcggctagcgcggcgagggattcaggaagaatacgtttttgacggtcaagcagcgtgccgtcgagatcgagcgcgataacgcgataagtcatgagcggttccagcagattgtcggtggataaaattaaggctattgatgttacaccttaaatctaaatgttaaaacctcgcatccggcgctaatgccttggcacagtaataggctatgctgatgaacagcgcacttacaataacgaaccctatttcagctttaataaggagatatgatgaaacaagtcgtttatgttgccagcccggacagccagcagatccacgcctttaacctgcatgacgacggagagctgtcgctgctgcaaacggttgaagtcccagggcaggtgcagccgatggtggcgtcgccggattctcgccatctgtacgtgggcattcgccctgagtttgcaattctgacctatcatatcggccacgacggcaagctggagcaggccggcatggcaccgctgcctggcagcccgacccatctgggcatcgacttgcagggacgtttcgtctttagcgcctcctacagctacaacaacgtcagcatccatccgatcggtaaagacggcgtggcgctggaccaccagcaggtgttggaaaaccttgaggctccacactcggccaatattagcccgaccaatcagctgctgatgatccctgcgctgaaagaggaccacattcgtctctatgatttcgcgctggacggtaaagcgaccccgcacaacccggttcaactgaccaccgcagcgggcgcgggtccgcgtcatatggcgttccacccgaaccagcattttgcctacaccgccaatgagctgaacggcaccgtggacgtgtatcagaaagacgtaacccgcggcgagtaccatgccgtgcagacgctggatatcattcctgccgatttcacgggcgatcgctggaccgcagacattcacatcactcctgacggtaaatacctgtacgcctccgagcgcacctcaagcctgctggccatcatgaaagtttctgaggacggcagcgagatctcgctggtgggacatcatccgacccagacccagccacgcggtttcaatatcgataacagcggtaaattcgtgattaccgccggtcagaaatctgatgagattgaagtggcgcgcatcgaccaggctaccggcaaactgagccgactgaacacctatccggtgggcaaaggcgcgatgtgggtcaccattatcgagctgcatcactaatcgttaccgcctgaaaagcgcataaaaaaacgccagagcttaatcagcctggcgtttttattttcagtccgtcaatcgacggggtcaggcgttattttgcgccagcgaacacattattgtactgccacaggcggttgaagccggtgtcgttaaggtcacgattaggcgcaacgttgccgctgaacggacgctcggagtaggccgcatcgccccaaggctgttgcaggttgtagctgccgtcaatttggctgtcgcggatgaccaactggccgtttggcgtctggcccggtgcgtagccccctttatcgacgcccaggtcaactgagcgaccgagcagcgctttctgcgccgcgccctggccgctgaagcctttgtcgccggtcaggttactgtcgatgaccaaataaccgtaaggcacgttggccggggttatcggagcaaagatgctggcctgcttcacgccacggcttgaaagggtatggaattcaacgtgatcgaacacggcgttagcttggccggtgacatagtccacgtcgccttcaatcaggctattgtgcacgtagacgcggctatagcggttgttcacggtctgattattcacgtcgctggtgttgaccagcagggtgttttcacggcccagtacgtgcacgttgtcgagcagcgtctggtcaccgtcaacgcgcagcgccacggcagggtgttcgcctgcgtcggtggtgtcctgcaggctgttggcgatggtcaggttttgcagctggaggccattaccctgtgaccacagtgtcgcggaacagctcacgccgatgctggcgttctgcggattgccacattggttgaacatgtaccatgcgcggtcgcccggcaggaattcaccgttcgggctaacggtcttgcggtaatctgcgggagcaacgctggcttccagacccagctgcagcacaacctgatccgcgctctcgcctgcaccaaacaggctgacaggtggggaaccggcagggatataaatggcgccgctgtaggtgcccggcagaaccttgataaatacgcgctcgccgtggttatgctgcgccagtgcggcatctaccgcctgttgtacggtggtgtaagttgcgccatcgttgccttttttagggccaacgatgtaaggggtattcacgctatcggttttcgccagagacggatgccagccgtcctgctgaacctcaacggaaggaccaccgaaggccaggtaggacttctcggtgaagtgggccgcttcatcagcgctaagaacaggcagagccgcggtacccggtgcaacctgtgtggacaggttttcctggctgtggctacaggccgctagaaccaatgtggcagacaaaacagcgctggcacgcgacagggtggaaattttcacagtctctgactccttgatgcacaaaaaaagcggccagctcggctgaccacttatcaattcaaaatctggattaaataccgattttttgaagtactggtttcgtagcttacaaatatttcggataaaaacatgcggctttttatcacaaagccgattttatcattaagaaatatttattgtgtatacaaaaagcgcagtaattagctgaaaatcaccgttaaagaggcttttgccagcgtatggaagtgcaggttaaagcccagataggcaccgctggactcttcgctgacgtcaagttggtcaacgtcgagcgcataaacggtgaactggtaacggtgatgctcgccctgtggcggtgctgcgccgccgtatcccgccttgccaaagtcggtgcgcgtttgcacggcacccgccggcagtccccctttgcctgaaccagcaccggtcggcagagagcgcagatccgcgggcagattggccacaccccagtgccaccagccggaaccggttggtgcatccggatcatagcaggtgatggcgaaacttttggtgccagccggagggttgtcccagctcagctgaggagacaggttgtcgccctcatagcccataccgttgaacacctggccgttcggcatcttgtcgccgtctttaagatcggtactttttactgtaaaagccataacaccctcatttgttgttataaattctcagtccgagcctagcattttcagcaatgcctgagcaacgccggcggaagacgccggattttgtccggtaatcagcctgccgtcgactatcacataaggacgccagtccgcggccttgctgtattcaccgccattcttcttcagatcgtcttcgaccaggaaggggacgacctcggtcaactgcaccgcctcttcttcactgttgctaaagccggtgacgtgcttgtctttgaccagcggaatatcgtcgatttcaacgtgtcggaaaacgcccggcgcgtggcacacggcggcgaccggtttgtcggcgcgccagaatgcctcgataagcttgatggaatgctcgtcctccgccagatcccacagcggtccgtggcctcccggatagaaaacggcgtcaaaatcgtcggcattgatctcgctgagcttgcgtgtttccgccagccgtttctgtgcctctttatcctgacggaaccgttcggtggtttctgtctgggcgtcaggctcgtcgcttttcgggtcaagcggtggctggccgcccttcggcgatgcgagcacgatatccgcgcccgcgtccaggaactcgtaatagggagaagtgaactcctcaagccagaatccggttttcttaccggtatcacccaatttatcgtgagacgtcaagactattaatagtttcataaacttatctccaataatgtcggggaataattcccaatcaaattattccgcttccttacctacctgtatcaccaacttgccgaagtttttaccctccagcacgtcgtttaacgaggctggtgcattttccaatccctggacgatgtgttcacggaactttatcttgtccgctgcgaaccattcactcatctgtttggcaaattctggataacggtggccatagtcatcgaaaataatgaaaccctgaatgcgcaggcgtttcttcaggattgcggtggtcagtagcgtcagacggtcctcaccctttggcagttcctgagcattatactgtgacaccacgccgcacagcgggacgcgcgccttggtgttgagcagcggcagtaccgcgtcaaacaccgccccgcccacgttttcaaaatagacgtcgatgccgcgcggacaggcttcttttaggcgctgaccgaggttggcggcacggtgatccagacattcgtcaaaaccaaaatgctcgaccgcataacggcatttctcttcaccgccggcgatgcccacgaccttacagcctttaagtttagcaatttgcccaaccaatgaccctaccgggccggtcgcggccgccacgacgacggtttcaccggcctttggctcgccgatatccagcagacccatataggccgtgaaacccggcatcccgagcacgccgagcgccagtgaagggtgtttcaacgcatcgccttcgagctttctggccagtttggcatcaacgacggcgtagtcctgccagccgctccctgcgaccacccagtcacccggtttgaaatgggcatcttttgactcgacgacgcgtgaaaccgcacctccaaccatcacgtcaccgagggcaaccggcggagcataagaggggcatcgctcatgcgtccgcgcatatacgggtcaagcgacagataaacagtgcgcagcagcagctggccatcggcaggttttggcaggtcggtttcttccagacggaagttttccgccaccggcgctcctttcggacgtgaggctaaaacgaagcggcgattaacggttgaattctgtgacatgctgactccttaagatttaaaaagacttccaccgggaacaagtataggacgccaggcggtatcgtaagggaacagtaacagggggaagcgttaaggtacagaaatcagaggacttgttttgttaatagataataataaaagctttgttggcaaggagatatctcccgccgccggggaacaggcggcgggaaaaaaatgcaggcagaattattttggcgttacgtcgatatcgccaaagtattttttggcgagctgtttaacggtgccgtcctgtttgattttggcaatcgccttgtcgagacgctctttattggcggtgtcgcctttgcgcaggccaaaagcgatgccgctgccgaggattttgtcgtcgtctacgctgtcgccaacgaagccaaagcctttgccgtccgggcggtcaaggaagccagactgacccgcggcggccatgaccaatgtcccgtcgaggcggccggaagtcagatcaaggtaaacctgattctgatcctgatacgacaccacgtctacccctttgggcgcccaatgtgcctgggcgtaggtttcctgaatcgagccttgcagcacgccaatgtgcttgcctttcagcgaggcagcgtccggcaacaggcctgaaccggttttagcgataagcttggtaggaatacggtagataacgtctgagaaatcaatcgcctcacggcgtttatcggtggcgttcatcgcagagttgatggcatcgaacttgcgcgctttgagcgctgggataagcccgtcgaaagaggtttcgctccattcgcacttggcgttggctgcggcacagaccgctttgcccaagtcgatatcaaagccttgcagttcaccgtttggggatttggactcgaacggcggatattgcgcctcaagaccaaacttgatggtgtcgtttgccgccatcgttgaaaacgacgctagggcacaactcaacagcagcaaacttttcaatttatgcatttttatggctccaggataggtatttcaaacgccagaaagacggcgcgcgccttcataaagtgtttcatcatctttcgcaaagctgagtcgaatcaaccctgtaggcttattgtcactgtaaaatgccgacagtggaatgctcgaaacctgatgatcgcgaatcaatttcagcacgaactcatcatcgctaagcgggctgaagtggttgaatcgagcgagcataaagaagctaccgcgcgttggaagcagttcaaagcgcgagccgtgcatcgctttgaccagtaaatcacgtttttgctgataaaaatcagccagacccaaataactttgcgggtcggccagcgcttcggcgaaggcgtattgcatcggcgtatcggcggtgaagaccataaactggtgcaccttacggatttcgtccatcagcgcttccggtgccagtgtgtaccccacgcgccagccggtgacgtgataggttttaccgaacgacgatacgataacgctgcgctcggcgagctcagggtgacgcgccatgctctcgtgacgttcgccgtcaaagaccacgtgttcataaacctcatcagagaggatgacgatatcggtgttgcgggtcagcgcagtcaggcggtcaatgtcatgctgggtgaaaatcgcgccggtcggattgtgcgggctattgatgatgatcatccgcgtgcggctgttgataacactcgcgacctcgtcccagtcgatgctgaaatcgtccatcgacaggcggacaggtaccggtttcgcgccctgtaaacggacgatcggcgagtagctgtcgaaagccggttcaaaatagatgacctcatcgcctggatgcaccagtgcgctaatggccgaataaataccttcactggcgctggcaattacggtgacttcactgtcggcgtcgtaatgacagccgtacagcgcttctaccttggccgagagcgcacggcgcaaagctgccacaccgctcattggcgcatattggttctggcctgcgcgcatcgatttcgcgacggcgtctatcagcgaaggctggcaagaaaaattgggcgccccctgagacaggttcagggcgttatgctctgcacttaactggccaatcacggtgaaaatagtggtgccgacgtcaggtaatttcgactgcggggacatggcgcttttcatgcaaactcctgtgaggcggggcgaaagggcgtataagtatgactcgattaagcaacagtttcgctgggccgacaatggaaagtttgtcatacttgccatgatctgaggtcatagctggagccgtatcacgatgagttcaccccttgattttatgcccgcgtcttcatcctctttagtgccgaatctccctccgctaaatttgctgaaaacctttgtcgtcgtcgcgcaaaccctgaatctcacgcgcgccgccgagctcctgcacattacccagggcgcggtgagccgtcagattaccggcctggagtcgcatctgggatatccgttgtttgtacgtcaggccagaggcttgaccctgacaccgcgcggtgcacagttgctgcccccatccggctggcaatgacgcagatgggagaggcgctacagcgggtggcgagccatcccgatacgctgcgcatcaagtgcccgacctgttcgatgcgctggctgctgccgcgtgttatcaagctgcaaaacgacaggccggacatgcaaattgaactgaccgcttcggtggcacacggggtggattttagccgtgaacattttgatgccgcggtggtgtttgggcggccggtggagagttcgctgcatgcgatgcacctgtttgacgaggtgctgacgccggtttgcgtgccgagcctgttgccagtcaggcagaaagaggcgcgagtcacggatctcgcggatcaaacgcttttacatccgacccgcgatcgccgcgactggctgctgtggctaaaaacggccggtgcgcagacgctgccgtcgagtaaatcgcagcatttcgatacgctagacttggccatcaactcggcattgcagggctatggcgtggccatcggcgatttaacgctgatcgaagacgatctgcaggcgcagcgggtgatagccccctttaccctgtgcgtggcgagcggggcgacctatcagctgctttatcccgacaatccgagcccggcgctgcgcgttgccatcgattttctcaatcaggaagcgcagcacagccgggccagactcgatgcactgctggcagcatcgcgccagttggtaaggacaggcgcttaatcaataaagcgtcgtcagcgcgcgggcgatagcctgagtcagtcggctgagctgttctctgtcgatgacgtaaggcggcatcaggtaaatcagtttgccgaacgggcgaatccataccccttcggcgacaaaatgctgttgcagccgcgccatatcgaccggttgacgcatctcaaccacgccaattgcgcccagcacgcgcacgtcggccactgccggatgcgccccaagtggcgtaagttcgtgcttcagctgtgcttcaatggccgccacctgctgcggccagcggttttcggcgagcagcgacagactcgcgctggcgacggcgcaggccagcggattgcccataaacgtcgggccgtgcataaagcatcccgcctcaccgttgctaatgatgttggccacttcacgtgtcgtcagcgtggccgacagcgtcatgtagccgccggtcagcgctttgccgaggcataaaatatccggcgcgatccctgcatgttcacaggcaaacagcttgccggtacggccaaaaccggtggcaatctcgtcggcaatcagcagtacgccaaactcgtcgcacagtgcgcgcacctgatgcaggtattgcggatgatagatgcgcatgccgcccgcgccctgaaccaccggctcgaggataaccgcggcaatttcgcgacgatgttccgccagcagggcagcgaacggcgctatctcctgcggatcccactctccctcaaagcagctctgcggcgcgggagcaaacagatgttcgggcagataaccctgatacaggctgtgcatcgaattttgcgggtcacacaccgccatcgcgccaaacgtatcgccatgataaccgtggcgcagggtcagtatcttctggcgtttttcgccgcgcgcctgccagtattgcatcgccatctttaacgcgacctcgaccgccaccgacccagagtccgctaaaaatacgcactccaacgcctcgggcgtcatgtcgaccagctgctttgccagcgcgatagccgacggatgggtaatgccgccaaacatcacgtgcgacatcttgccaatctgttcaatcgccgccttgttgagtcgcggatggttgtagccgtgaatggccgcccaccacgatgacatgccgtcaaccaactgtcgcccgtctgccagatgcagcatcacccctcggcggactcgaccggataggtcggcagcgggcgggtcatggaggtgtacggatgccagatatggcgttgatcaaattcgaggtcggccggtgtcatgaagagttcctgtcgtcgggggtgtacttaagtcgtaaaccaaaaataaaatattacgttgaccgtaaactaaaataaatcaaaaatggtttacggtatatcattacttttggagatgtcttatgacagcccgcactcgttggaactatgagcaaactcaagccttattcgaaaaaccttttctggaactgatgtttgaagcgcagcagatccaccgccagcactttgacccacgtcaggttcaggtcagtacactgctgtcgattaagaccggagcctgcccggaagactgcaaatattgtccgcagagttcgcgctacaagaccgggcttgaatccgaacgtttgatgcaggtcgagcaggtgctggagtctgcgcggcaggccaaagcggcgggttcgacgcgtttttgcatgggcgccgcctggaagaatcctcacgatcgcgatatgccctatcttgagcagatggtgcagggcgtgaaggagctaggcatggagacctgcatgacgctgggtacgctgaataccacccaggcgcagcgtctggcctcggcggggctggatttttataaccataacctcgacacctcaccagagttctacggcagtatcatcaccactcgcagctaccaggagcgtttggatacgctcgaggaggtgcgcggtgcgggcatcaaagtctgctcgggcggcatcgttgggttgggagagacggtcaaggaccgcgccggcctgctgatgcagttggcgaaccttccggtcccaccggaaagcgtgccaatcaacatgctggtcaaggtcaaaggcacgccgctggccgacaacgacgacgtcgatccttttgattttattcgcactatcgccgtagcacgcatcatgatgccgcgctcctacgtgcgtctttcggcggggcgtgagcagatgagcgagcagacgcaggcaatgtgcttcatggccggtgccaactcgattttctacggctgtaaactgctgaccacgccgaaccctgcggaagacaaagatctgattctattcggcaaactggggcttaatccacagaactttgccaccgaaatgggcgaccaagagcagcagcaggcgttgagttcgcagctgatgcacgccgacagcgatatgttttacaacgccgcggtctgacggacgatgacctggtctgcgcgtattcaaaccgctctcgacgaacgccggcaggctgatgcgttcaggcagcgccgtcctaatgccgggggaatggccgctggatagcgctcgacgaccgccgctaccttaacttctcgggcaacgattatctggggctgtcgcagcgcgaagaggtgattgccgcctggcagcaaggggctgcgcgctatggcgtcggtagcggtgggtcgggccacgtgaccggttttacccacgcgcatcatgagctagaacagcagttggccgactggcagggctatccgcgggcgctgctgtttatctcgggattcgcggccaatcaggcggtcgtcgcggcgatgatgcaggccgacgatcggattttggccgataaactgagccacgcctcactgcttgaggcggccgttcagtctccggcgcagctgcggcgttttgcccacaatcagccggcgtcgctggcgcgtctgcttgaaaaatcggcggtgggtgaaaccctgaccataaccgaggggttttcagcatggacggagacaccgcaccgctggctgaactccatcacctgactcgccgccacggcagtgggttgatggtggatgatgcccacggtgtgggtgttcttggcgagcaggggcgcggcagttgctggcagcagggcgttaaacccgaactgctggtgctgacttttggtaaggcgtttggctgtagcggtgccgcggtgctgtgtgacgatgccaccgccgattatttgttgcagttcgcgcgtcatctgatttacagcaccgcgatgcccgcggcgcaggcctgtacgcttcaggctgccctgacatgtattcagcaagctgatgacctgcgtgataaactggcggccaacattgcccgtttcaggacgggtgcggcgcagctgggtctgcggttaaccgactcctcgagcgctattcaacccctgatagttggggaaaatcggcctgcgatggtgttggcagagcgcctgcgcgaacgtgggatgtgggtcagcgcaattcgtccgccgaccgttccacccggcagtgcgcgtttacgcctgacccttacggctgcccatcagcccgaagatattgatattttgctggagtccctgaatgggtgcagtcacggaattagtgaataaaaaagcggtcgccgatgcgttcagtcgcgcggcccacagttatgaaggcgcggctgaattgcagcgccagagcggcgataccctgatggcgatggccgctttacaggacgcgacgctcggtgaaaaggtgctcgacgcaggctgcggcactggctatttcagccgccgctggcgcgaactgaataagaatgtcaccgcactcgatctctccgaaggcatgctggcgcgtgcccgagagatcaactctgccgacgtctatctgccgggcgacatcgaacggctgccgcttgccgacaattccgtcgatatcacttttagcaatctggcggtgcagtggtgcaatgcgctgccgcgtgcgctggaggagatggtgcgggtgacgcgtccgggcggcatcgtgctattttcgacgctggcggaaaattcgctgctggaactgtcgcaggcctggatgaaggttgacggtcgtccacacgtcaacaaattcctcaccccggataaaattgccgaggcctgtgcgccttacacccaccacgtcgaattcagtcagcacacctcgctgtttcctgacgtgatgagcctgatgcgttcgctaaaaggcatcggcgcgacgcacattaaaggcggaaggctcgggggattgggcggccgagaacgtctggccttgcttgacaagcactacgtgcgtcgcgacgggatgctgccactgacctatcgcctggtctatgggcttatccagtgtgagaaagaataaaaagagtaaaacatgaataaaaagcgctggtttatcactggcaccgacaccgaagtcggaaaaactgtggctacctgtgccttcttgcaggcagccaaagcggcaggcatgagcactgccggatacaaaccggttgcctcgggcagcgaaatgacgccagagggcatccgcaacggcgatgcgctggcattacaggccaacagttccgtcgcgctggactacgcgcaggttaacccttgcacttttctgcagccgacctcgccacacatcgtcagcgaactggaagggcgacctatcgagtttgaggtgctatcgaagggattgcgtgaacttgaacctttagcggactgggtcgtggtcgaaggagcagggggatggtttacgccgctcaatgcctcgcaaacctttgctgactgggtggtagaagaagggctgccggttatcctggtggttggcatgcggctgggctgtatcaaccacgcggtactgaccgcacaggctatctcgcaaagtggtttgcggctggccgggtggattgccaatgacgttgaggagacggggcagcatcatcaggcctatctcgcaacgttaacacgtatgctgcctgcgcccctgttgggcgagatcccgtatcttcaaaagcatcaattcaacgatcctggtcgctatttgtcgctcgagtgcttgctgtaagccgcttcatactgtgagataggtcttcaccagattctcatcgaggtcggccaacgtaccttgtgcgacgttgcgtccgccgtcgagcagacagaaacggtcggcgacgcttcgaataaacggcagcttgtggcctacaagtagcagcgtcaggccgaggtcgcggttgaggcggtggataatattgcccatgttggcttccatcgcctcgctagtgtgctcggtcggctcatcaagaataagcagctccggctcctgcaccagcgcgcggctgatagccagctgctgttgctgcgtctcgtcaagctctccggccttacgcgaccctttctctttcatcgacggaaacaggtcatagacttgagaaggtacgcggcgcgttttattgcggctggccatcatcgcaatttgcaggttttcgtcgacgctcatctgcgagaaaatttgccgtccctgagggacgtagccaatgcccatctgcgcgcgtgtttccaccggcagtgccagcaggttttgcggctcctggttagcagaatgccagatcatcgagccacttttaaccggcaaatggcccattatgcagttaaccaacgtcgttttaccgacgccattacggcctatcaggcagttgcactggccgcggtaaagctcgagattgatgtcccacaggatatgattttgaccataaaactggttaaccgcttttacacttagcatcagttgttcctcacttgttcggcgttccgttgaacacaacattgacaacccctgtcatatttctgacattttttcgatgccgttagtctgttaacacaggattaaattccgtttaagtctcgcatttaaacagcattaacaagtgacaaacggccatcccgcagtgctaaacggctaaaactgacgttttttcgccttaaaagcattcactgttgctaaaaaatagagaattattgggcataagattaatcagcacattatctgtaaagctaaccctttggactaatactgcaactcttgggccaagtttaaaaagataagtcttaaaggattgtgaagcaggcaccgcgaggctgcggcaggcctaccctgtgccaatgcattaccaaaattaatgttatcggacaagttgaggattcgaggtgcactttgccagtgctgaggctggaagttttggtgcaagcaaaaggcaaggagagagcagaaaaatcctgatgagatgcacatatcaattttgcaatccaaaagagcggctttttctaggtcaaaactgaatatataaagaaataaaagtgtaaaaaaataactaaaaaaacgtcaaatgaggcaccaaaggctaaatgtctatttttgtcagcgcacggcccaagcggcgcgctgagacttatccactattcctgtggataaccttgtgcatgagagttataaaagttgctacaggcgagtcggggcgcgggttgagcttagtttgcccgcattctcgactttttagggaaaatcctatttatcaataggttaattaaaatcaagagcacccttgtctgaccctagtgattgtgtaaattttcgtcagtcgagcttgcaaaagttaattcgcgatagaatctggggataaatgtcccttgatggggaaaatgggtggacggcgttacctgaaaaagtgcaatccgaccgctcaagaaagaatcgtagcttgatgctgggtttttatccagtataatgtttagtccaagcttgtctatgttccatttgacaaggtgagtgagtattccatacttcctctccggtctcgcacgttctcatctcaggtagcccgcaatgagcaaagtattcaaactacattccgaattcaaaccttcgggcgatcagcctgaggctattcgccgccttgaagaagggctggaaaacggtctggcgcaccagacgctgctgggcgtgaccggctcaggcaaaacgttcaccgtcgccaacgtgattgccgacctgaaccggcccaccatggtgttggcgcccaacaaaacgctggcggcgcagctctatggtgagatgaaagagttcttccccgagaacgcggtggaatattttgtttcctattacgattattatcagcccgaagcctacgtgccgagctccgatacctttatcgagaaagacgcctcggttaacgaacacatcgagcagatgcgactctcggcgaccaaggcgttgcttgaacgcaaagacgtgatagtggtggcctcggtctctgccatctatggtctgggcgaccctgacctctatctgaagatgatgctgcacctgaccaagggcatgatcatcgatcagcgttcaattctgcgccgtcttgccgagctgcagtatgcgcgcaatgaccaggctttccagcgcagtacgtttcgcgttcgtggcgaggttatcgacatcttcccggccgagtctgatgacctggcgctgcgcgtcgagctgttcgacgacgaggttgagcggctttcactgttcgatccactgaccggacaggtatcgcaggaagtgcctcgctttactatttacccgaaaacgcactacgtgacgccgcgtgagcgcatcgtgcaggcgatggaagagataaaagtcgagctggccgaccggcgcaagaatctgctggcgaacaacaagctgctggaagagcaacgtatcagccagcgtacccagttcgaccttgagatgatgaacgagctcggctactgctcgggcatcgaaaactactcgcgctatctctccgggcgtggcgaaggtatgccgccaccgacgctgtttgactacctgcctgctgatgggctgctgattgtcgatgagtcccatgtcaccattccgcagataggcggcatgtacaaaggcgaccgttcgcgcaaagagacgctggtggagtacggtttccgtttgccctcggcgctggacaaccgtccgctgcgctttgaagagttcgaggcgctggccccgcagagcatttacgtctcggcgacaccgggcaactatgagctggagaaatccggtggcgacgtgatagaccaggtggtcaggccgaccgggctgctcgatccgctgattgaagtgcggccagtgagcacgcaggtcgacgatctgctgtctgagatccgcaaacgcgtggcgatcaacgagcgcgtgctggtgacgaccttgaccaagcgcatggccgaagatctcaccgaatacctcgaggagcacggtgagaaggtgcgttacctgcactcagacatcgacaccgtcgagcgcgtcgagataattcgtgacctgcgtctgggcgagtttgacgtgctggtggggatcaacctgttgcgagagggtttggacatgccggaggtatcgctggtggcgattctcgatgccgataaagaaggcttcctgcgctctgagcgttcgcttatccagaccattggtcgtgcggcgcgtaaccttaacggcaaggcgattctgtacggcgacaagattaccaactcgatggctaaggctatcggcgagaccgagcgtcgccgcgcgaaacaggaggcctacaacctcgaaaggggcattacgccgcagggtctgaacaagaaaatcggcgacattcttcagcttggacagccgaaattcaagaaaaacaaagagctgcgtgaagcgcaggcggcttcaacggtcaaggcacttacgccgaaggcgctggagcaacgcattcgcgagctggaagcgaagatgtaccagcatgcgcagaatctggagtttgaagacgccgcgaatacgcgtgatgagttgcatgcattacgcgaacaatttatcgcgttatcctaaataccccctatctttcgcagcgtggggcgttggcttcccttgctcaccccggtcactgacttgtgtcagctcccggggactcgcgcggttgccgccttcccacggcacgaaatctagtgagtattgcggtggtgtattatgctagacttcgcggcccaaacttttagcggtgacagccaaatgaccgacattaaacccaaagatcctcttcacggcgttacgctggaaaaactgctcaccgtgttggtggagaactttggctggccggcgctggcggggcaggtgaatatcaactgcttcaagagcgaccctagcatcaagtcgagcctgaagtttttacgccgcacgccgtgggcgcgcaaagaggttgagacgttgtatctggatttcgtggaggggttgctgaagcctgacatgagcagcaagagcaaaaggcgctcgacatcgccggcttcaacgccagcagctgtgaagaaggccagcagcgccaaaccggccgccgacagcccgtggaataaccatccgctggtcaagaaaaaccaggctgacgagtcttaatatagagttagcccatgcgctggagtgcgtcttccagcgccagtctcagcagttctctgtcatggcgatagggaacgtccatggcctcgagcgggcgttgaataatcaaccgactgctcgcctccccaagatgcacccccggtccgacgatcgccgcattaatggcgggacgaccaatctgtttttcgatcatgttgagtttgtcttgcagcgttaacgacgcggcggccacgctcagttctttgcccaaattgctgatgtaaacaatgtgagcgcggctgcgtcgaagctctgtcgccagctctttaagcagcagcagcggcatcaggctggtaaagaagctgccggggcctatcacaatcaggtcggcctctgcgatggcatccagcgcctctcgggtggcctttacctgcggttcaagcatcagttcgcgcgggatctttatcatccgatcgacgttcacttcaccgtggatcggttgcccgtctgcgtcgatggcggccagatcgaccggatcctctgacatcgggatcaactctgcatcgacctttaacagtctgcgtactagattcatcgcctccagtggccgaacgctcaggctgtcgagtgcacggaggataaggtttcccagattgtgtccgtcgagctcgccgctgccgctaaaacgatactcgaacatggctgacgcgacgctaggctcggtaattagctggttaaggcagttgcgcatatctccccacgcaatgccgcccaccgagcggcggatcctgcccgtggaaccgccgttatcggtggtcgtcacaataccggtcagcctcgagccgagcgaagacagtgacgacattacgcgccctagtccatggcctccacccagtgcaactactctgtctaaatcggccaacgtccgacttctcatacttctccttggcttcccgtcgttcgctggcgatgcagcagcttgggcttcatctgctcactccggatccttacgctggtaagcatccgagaataatcagctttgccgccgtgcttcttcgccaatcaagcgggaagtattgtgctgatggcataaaattttctgaaacaattttacctaatttttcgctaacttgttattaatcgtacttgtcagtgcagggacgacgaggcgattgatttcataggtgtttttattggtcggtgctctaaaaaacgttgtatatccaattacatagcgaagagttcgcttggcgaacgcgttttcgcggcgctacaatactgctcaaccgtgtttttccggagactaaaatcggaaaaactgaactcctagccttggtacctaagttgtcttgcctctgccgtgtatttcatcgtgcagcctgcaataaggtgccttggccgtgacgtatgtcaccagggtgctgggtagaaatgcccgcatctcccgtatttggaaaggtgttatcaaggtgcaacaacttacagacgcttttgcgcgcaagttctattacttgcgcctgtcgatcaccgatgtgtgcaattttcgttgcacatattgtctgcccgacggctataaacccaatggccacaacaataaaagtttcctttcactcgatgaaattcgtcgggtgagccgcgcttttgccaatctcggcaccgaaaaggtgcgtctgaccggtggcgaaccctcactacgccgtgactttaccgacatcatcgctgccgtgcgcgaaaacccgcagattcggcatcttgccgtgaccaccaacggttatcgcctggcgcgagacataacacaatggcgcgatgcgggtttaaccgctctcaatgtcagtgttgacagcctcgatgcgcgtcagttccacgccattaccgggcaggataaatttcgtgaagtgatgagcggaattgacgccgcatttgacgcaggtttcgaaaaagttaaggtcaacgccgtgctgatgcgcgacgtgaatcataatagcctccagaccttcctcaactggatcaaagaccgcccaattcagctacgctttatcgagcttatggaaactggcgacgggggttcccttttccgcaagcatcacgtatcgggtcaggtcattcgtgaccaactggtgcagcagggttggacgctgatgggccgcagccgcagcgatggtccggctcaggtctttactcaccccgactacattggcgaaatcggtctgatcatgccctatgagaaggatttttgcgccacctgcaaccgcctgcgcgtctcggccgttggcaatctgcacctgtgcctgtttggtgagcagggtattcctctgcgtgatttactggccgatgaccagcagcaggaagcgctcatggcgcggatccaaggtggactgggacgcaagaaacagacccacttcctgcatcagggcaataccggcatgacgcagaacctctcatttattggcggctaatctccaaagggaaaaaaatatgagcaaagccagcagcgaatttcaggcgctctcgatagctattcttactgtttccgacaaacgcactgaaaccgatgatacttccggggactatctgcgtgaggcggtggaagagggcgggcatcacgtagttgctcgtcagattagtaaagacaacctttatcagattcgggcggtagtatcccaatggattgctgacgaaaagattggcgcggtcattatcaacggcggtaccggttttactaccggcgacaatacgcctgaggcgttaaagccgctgtttgaccgtgaaatcgaaggcttcggcgaactgttccgtatggtctcttttgaagacattggtacggcgaccattcagtcccgcgcgctggccggtatggcgaatcacacggtgatttttgccgtgcctggctcgaccaatgcctgtaagttggcctgggagcacatcatctcttcgcagcttgatgcccgtaatcgcccctgtaactttattcctcacgtaagaaagtaaaacgaaattatgtctacactgacgcatatcaatgcctccggcgaagcgcatatggtggacgtttccggtaaagcggaaaccgttcgcgaggcccgcgccgaagcctttgtgaccatggctgccagcacgctggcgatgatagtcaaaggcgatcatcataagggtgatgtctttgccaccgcgcgtatcgccggtattcaggcggccaagaaaacctgggacctcattcccctgtgtcatccgctgttgctgaccaaggttgaagtcaagcttgaggctcagcctgaatttgaccgcgtgcgcatcgagagtctgtgccgtctgaccggcaagaccggcgtcgagatggaggcgctgacggcggcgtcggttgctgcgctgactatctatgacatgtgcaaagcggttcagaaagacatggtgctcgggccgattcgcttgctcgagaaaagcggcggcaaatccggtgacttcaaggcggaacaatgattgaggtgctgttttttgctcaggttcgtgagctgattggcaccggcagtgtgcaggttgccgcagaattcagcgacgttgaggcgctgcggcagtcgttgtgcacgcgcggtgaacgttgggcgctggcgctggagtccggcaagctgctggtggcggtaaaccagacgctggtggagcctgatcattcgctgaaagaaggcgatgaagtggcatttttcccgccggtaaccggaggctaagcatgcaagcgacgcgaattattgtcgatgccgcgccttttagcgtcggcgaagagtatcagtggttagcacaatccgatgccgacggcgcggtggtgactttcaccggcaaagtgcgtaatcacaatctcggtgataatgtcagtgcgctgacgctcgaacattatccgggcatgaccgagaaggcgttggctgaaattgtcgacgaggcgcgtcagcgctggccgcttcagcgcgtctgcgtctatcaccgcattggcgcactgtatccgggcgacgaaatcgtgtttgtcggcgtaaccagtgcccaccgcggcatggcgtttgatgccacagaatttattatggattatttgaaaacgcgcgcgccgttctggaagcgtgaagccaccgagcatggagatcgctgggtcgagtcacgagataccgataaagaagccgctaaaaaatggtcttcttcgccatagacgcggagtctgtcttggtccgcgcttaagttaaaccaaacgtttacccgtgattggtgccacacgcagaagccggtttttgtgataggctaagagtaccggtaggctgcattttcagccttgtttttgtcctccatgtaagaggtaagcatcatggatcgatatccacgctctaatggttcgatagtagaacgcgcaaacagcggcattcaggcctatatggctcaggtctatggctggatgacctgtggtttgctgttgacggcgtttgtcgcctggtatgcatcccgttcccctgcgatcctcggttttatcttctcaagccaaattacctttttcggcctgattattcttcagctggccctggttttcgttatttcgggtatggttaatcgcctgagcggcactgtcgcaaccgggctgtttatgctttattcggcgctaaccggcttgacgctttccagcatcttcatcgtctacaccggttcatccattgccggcacttttgtggtggcgggcggtatgttcggcgcgatgagcgtcttcggttacaccaccaagcgcgacctgagccgcatgggcagcctgctatttatggcgttgatcggcatcgtgctggcgtcggtggtgaatatctggctgaaaagctcggcgctgatgtgggccgtaacctatatcggtgtggtggtgttcgtggggctgaccgcgtatgacacccaaaagctgaaaaacatgggtgagcagctgtcggtcaatgacaaggacaacttccgcaaatactctatcgtcggtgcgttgaccctgtatcttgatttcatcaacctgttcctgatgctgttgcgcattttcggcagcagaagataagttaattgagtcgaagaggggagcagctcgcgctgtctccccttttttttgcccttagtttaccggccgacccgcattcaattatttaaccctgacgccggtgggaacccttctgaaactccaccagatttgcaccgcgttgaagagcaccaaaatggcggtgaccagaaatacccagcggaagcctaacaacgcggaggtgccagagcctatcagcgggcccgccacgttgcccaggtacatgaatgactggttatatccgaagattcgaccggtgacctgctcactgctgtacttgaccagcagcgcctgtaccgcaggcataagcgcaccgtcgccgaagcccagcaggaagcgtaaaacgcccagctgcaccggtgtactgatggttgccatcaggcagaacaggatgaagcagaacaccagagccgcgattaatacgcggtgtgcgccaatgcggtcgccgagtttgccgagtttcggcgcggcgagcagggcggaaatccccggcacggcagcgatgaccccgctgataaaggcgatgttagcggtattgccggacaggttgcgaataaacagcgtcagaatcgggctaatggagccgttggcgagttggatcatcatcgtggtcacgaacaggctaatgatgagcattgggtaaggcagcgtggtaaataccgctttgccgctgagcctgtcggccttactgaccggcactacgcgctctttaatcaggaacagcgtgatgaggaagctgataaacagcaggccaccggtgacgaaaaacaccgtgcgcaggccgagatggtcggccatgaatccgcccaacagcggtccgataattaccccggcaacctggccggtagacagggtacccaacgcccaaccgctcttgtcgcgtggaacctgcgaggcgaccagcgccatggcgttggggataaagccggaagtcaggcccatcagcgtgcggaagataaacagctgccagacgttttgcgcgaagccctgtagtaccatgactatcgccatacccagcgccgcgcgcagcagcatcagttttcgccctttgcggtcggctaaactgccccacagcggggccacgcaggcggaaaccataaaggtgccactaaacaccagcccggaccagatactcagagcttcgtggtcatgaacgccaagttgttcgacatacagcggcaggaagggcaggatttcactcatagcgagaccggtaaagaagcagcctagccagacggagattagatttagtttccaggtttccattgtattgcggcgttgccttatggatgaaatagttaaccctcggaatcatagcaagctaatgctttgatgaaatcacaaaaagtgataactaaacgagcgtgataataattaacgatgctataacaaacatcgtcaaatcggcggcagaaaatatcgttaaatcaggattggacggattcatttacagcttgaatcatataaatgcacgcggggcgtgatatctgttagaatcctcgcaactggcgcactgcagtttgtgccgaatcctcgtggtaatcctcatttgcctcgtctgatcatccattcttgaaactgcaccgaacctgttcgggttagagtggattggagcttttccttatatgtcatttgattctctcggcctgagtgccgacattctgcgtgctgttgaagagcagggctataccgcgcctacgcctattcaacaacaggcaattcctgttgtgttgcaaggccgtgatttaatggctagcgcacaaactggtactggtaaaaccgctggctttaccctgcctgttttgcagatgctgagccacactggcgacgcacagattaaaggtcgtcgtccggttcgcgcattgattctgacgccaacccgcgaactggcggcacagatcggcgaaaacgtgacggcttacagcaaatacctgaagctgcgttcgctggtggtatttggtggtgtgagcatcaacccgcaaatgatgaaactgcgtggtggcatcgatattctggtggcaacaccgggacgcctgctggatctggaacaccagaacgccgttgacctgtccaaggttgagattctggttctggacgaagccgatcgcatgctggacatgggcttcatccacgatattcgtcgcgtgctggcgaaactgcctgccaagcgtcaaaacctgctgttctctgcgactttctctgacgaaatcaaggcactggccggcaaactgctgaccaaccctgcttccgttgaagtcgcgcgtcgcaacaccgcctcttcgcagattgagcaaagcgttcacttcgttgacaagcgccgtaaaagagagctgctgtcgcagatgatcggtaccggcaattggcagcaggtgctggtgtttacccgcaccaagcacggcgctaaccatctggccgagctgctgaataaagacggcatcaccgccgctgcaattcacggtaacaagagtcagggcgcacgtacgcgtgcactggccgatttcaaagacggcggcattcgcgtattggttgcgaccgatatcgccgcgcgcggtctggacatcgaccagctgcctcacgtcgtgaactatgagctgccgaacgtccctgaagactacgtgcaccgcatcggtcgtaccggtcgtgcagagtctaccggtgaagcgatttctctggtttgcgtcgatgaacacaagctgctgcgtgacattgagcgtctgttaaagcgtgaggtcccacgtatcgctctgcctggttacgagccggatccgtctatcaaagccgagccgatcgttaacggtcgtcaaggtggcaacggccgtggcgcaccgcgtcaaggcgccggtggccagcgttccggtgcccctcgtcagggtggtaacggtcagcgcagcggcaatggcggtaatggttcaggcgaaagccgtccatcctctcgtccaagccgtggcagcgcagctaatgcgggtcagcgtcgttcaggcgctaacgccggtgctgcacgcagccgtaagccttcaggcgagtaagcgaacaacgccggtagaacacacctggcgagtttcgtgcttaagccctctttcgagagggcttttttgtttttgtcgcgggtgctctagagccaaatacggtacgcacagcgtctcgcgccctgcaaaatgtgctcggtgcgctcaacgttggcgccgagcgtctggctgaacacctcgcgctccgcccggcagaatccctgacacgtggcggccgccgcgcagatagggcagtgattctcgaccagcagatagctttcgtcctcctgtttttcccagcttgccatatagccttcgccggtacgcagagttgccaagcgttgcaggcgttcttccagcgtctcggcgcccaccatcgccctgcggtaattctcgagggtctcggtttcgcgtgttgagataagctggtccagtgcggcttcacccagcgacgaacggatcatgcgcagtagctgtacggtgagactggcgtgggtatccgggaatcgggcgtggccttcgggcgttaacagccagtactgcgctgggcggccgacgccttgcgataccgccttgctttcgaccaacccctcttttgccagcttgacgaactgctggcgcatggcttcgcctgtagtacccaaaattttcccggcatcgctggcctgtagctcgcctcgggtcttgagcagcatcaaaagtcgctcggcgacgctctgttttgcactctcggaattttccaagtcttttcttgacatatttactctttaggtcctagattagggcaggaattattattccaagcaaaaacttgttttaatgtaaactaatcacggcgtgacttcaatcccgccgtgccggtcatgaaaaggaagcctgcaatgtcagagagtcacagcggatggggcagtttgtttacggccgagaatcgggggagtgccatcaccctgagcggcggcgtggcgctgtatgccaccaacagttatatcgtgattaccatcctgccgtcggtggtcgaggacatcggcggtatggcgtggtacgcgtggaataccacgctgtttgtggtcagcgctatcatgggcgcggcactgtcggcgcgtctgttgggcagatgtgggcctcgctgggcctatttgaatgcgacggcgattttcatggctggagcggcgatttgtacggtggctccgtcgatgccgatactgctgcttggcagagcggtgcaagggctcggcggcggattcctgtttgcgatgtcgtatgcgatggttaatcaggtgtttgaagaaaaactttggcctcgggcgatggcgctaatttcggcgatgtggggtgtcgccaccctggtcggcccggcggtgggcggcattttcgcggagctgcacgcctggcgctatgcgtttggtctgctgttgccggtcacgctgctgtttgcgctgctggtatggaaaagccttccggcgcgtcagcaaaagcgttcggtcactgaacctctgccacgtctgcagttggtgctgctggcgagcgcggtgctggcggtgtcggcgggaagcctgtcgcctcacggctggatgaatttcgccggcatcgtcgcggcgatagtgctggtgctgtggctgcgtaaaagggagtacaccaccccggttcgcctgctgccgcgagacgcgctgagcctgtcgtcgccgctgtgcgcgttgtttgccaccatggcgttgctgatgataggcatgggctttgatatttacgtgccgtatctgctgcagcatttgcacggtcaaacgccgctgatggccggatacattaccgccgccggtgccgctggctggacgttgggcgagatgtggagcgcgtcgtggcccgagcgccgcaccagcaccgccatccgtctggggccgccagtcatgatcctcagcctgctttgtctgctggtttcgctgcctgtggtattcggtgatggctggatgaacatggggctgattgtactgggcctgacgttgctgggatttgctaccggaattggctggccacacctgctgacccgcgtgttgcagcatgcgacagcagaagataaagaaaaagccggagcatcgataagcgtggtgcagtctttctccgccgccatgggcaccgcactggccggtaccgttgccaacctgtcgggaatttatgttccgggcgggactcagggagtaagccaggcggctttctggctgtcgctgctgtttatcgcggcaccgctggtggccattatcagcgcccggcgtgccacgcgcactgaacccgtgatgcagccggaggaaagcctcaactataaatagtccgcccattgccatcgctagccgttcgcccgtattattgcgcctcatttttaagggtagagcggctatgcgtgtattactggctccgatggaaggcgtactggatcctctggtgcgtgaacttctcagcgaagtaaacgactacgatctttgtatcaccgaatttttacgcgtggtcgaccaactgttgccggttaagtccttttaccgtctctgccccgaactgcttaacgaaagctgcacgccgtccggcacgcgggtccgggtccagctgctggggcaatatcccgaatggttgggtgagaatgccgcacgagctatcgaacttggctcttacggcgtggacctaaactgtggctgcccgtccaagacggtgaacggcagcggcggcggtgctaccttgctgaaagacccagagcttatctatctcggcgcgaaggcgatgcgtgaggcggtgcccgctgacctgccagttacggtgaagattcgcctcggctgggactcactggctcatagcctcgagatagccgacgcggtgcagcagtccggtgcgacggagcttacggtccacggtcgcaccaaggaggacggctaccgggcggagcgcatcaactggcaggcgatcggcgagattcgccaacgactgagcattccggtgattgccaacggtgaaatttgggattatgccagcgcccagcggtgtatgcaggtgactggctgtgactcggtgatgattgggcgaggcgcgctaaacgtgccaaaccttagccgggtggttaaatataatgaaccgaagatgccgtggccacaggtcatcgcgctgttgaaaaagtacacttatcttgaaaagcagggtgacaccggtttgtatcacgtggcgcgcatcaagcagtggctaggatatttgcgtaaagagtacagcgaggcaacggaggtgtttactcaggtgcgaaccttgaatacctcgaaagatatcgcgctcgcgattaagcgtttgtaaaagagaagggccatcaagcgatggcccttttttatatcagaagtgcatacccaaagacataaagaacacgcggcctgattcgttataggtgttggcacctgcgccgtagaggtaagcgccggtggtagagttgccggtggtctgcgcattgccttcacggaagtggcgtttgtcgagcacgttgtcgatacccgccgtcacgtccaggaacttgttcaccgtataggtcgaggtcaagccaaacagtgcgtaagggctgacgacccaggtttcggatccggtcgcatcttcacctttgtagttatacttcttcggcttctgcttgccgaaccaggtcatggttccgctcatcgaccagtcgtcacgtatctgccaatccaccgtcgagttgatggtgaatttcgggataaccgacagatagtcgttggtggtcttgttcacgttctcgatgttgtaggtgaagttgttgcgcatggcgacagattcactgatcgggaagttgagcgtcccttcgataccctgaaccacagccttcggcacgttttcccacttgtaaacgtcagaggtgctgctgatggaatattccgacgcgtagcccgcttcaatcttattgtggtagtcattacggtagtaggtcaacccggcctggacgtcattgtggtgatattcgatgccaatctctttgttgacgctggtttccgctttgaggtctttattaccctgcagatagcatgaaccggcgctggcgtagcagccctgaccgttgctgtagagcaggtaattagggttggtctggtacaggtttggcgctttgtaggcgcgcgcgatacccattttcagcgtgaagtcgctgcccagctcctgcgagaggttcagggacgggctgaaattcttgccggtaatggtctgataatcgaaacgcaggcccggtgtcacggtggtggtatcggtcagctcgatattgtcttcggtaaacagggaatagatatcggcggaagaataggggctgcggccggtgctcgatataccctcaacgctgccggcctgtgcggtctgcgtgttagaggttggatctttcattcgctgctggttccattccgccccgaaggtcgcggtttggtgaacgaagaaatcgagcggcacgttaatttcggtatgtgcgttgacgtcggccaaatcaatggtagagaacccttgattggtggtgctgaatataccctcggtaccgcccgcgaggccttcgttgatacgtttgttacgggtgcgttcgtactgaatatagttggtggtcgatacgccgttatcccagcttcctgtgtgtttcaggctcagcgtctgacggtaaagcacgttggtttccttgccatagttggcggtcaccagcgcgttggagttggtgttttgcgtatcccccgcgtacaggttgccctgacggctgtagcccgcagagagttccaacgcctgcttaggcgcaaaagcccagtgcagcacgccgttaacgttctcgtttttcaccccttcgcgacccgcaggcactgttccagcgtaagagccggtacgcgcggcttcatggccagcgttgatgttttgcgcatcggcctgagtcttagaccagccgccgtaaagtttaaagctcagcgtatcggtgaggccgcctgaaaggctcgcgtcatagcgtttggttgcgccttcggatttatgcgttggtgcatccatgtaggtattgaaggtgccgtgccagtctggggtggttggcttggtgataatgttgatgacgccccctgctgcaccgctgccgtagcgtgcggcggcaggaccgcgaatgacctgaatgctgtccaccatttctggcggtacccagttggtgtcaccgcggctgtcgcgctcgccgcgccagccgtagcgcacggagttcttgctggtcaccggcatgccgtcgatcagcacgagggtattttccgggcccataccgcgaatatcgatttggcgattgttgccgcgctggccgctggtggagttaccggtcaggttaacgccgggcatggtacggataatttcggccaggtcgcgcgccggcgggtgtttcttgatttcgtcttgagtaatgatagagacgcccggcgcttgcagggtttgttgctgtgcggtcaccgtaatggtgtcgtcttcgtccttctgttttttctctttgctgtctacgagcggtttattatctccctctttaagggttgttgtttgctcggcttgggaaagtgttggcataagcaggctaaaagaggtcacggagaataaggtgaccttggtataaaacaggatatttttcataatgtagcaggaccattccgttgctgaaaagaagcgcgctgtgttgttttaaaaataattagaagtaatttgaaataactttcatgagaatgctatcaataacgattatcgttatcaatgcaaataagtgttgagaatcgttcgctttgtgtatttatgatgtaaaggtgcagtaatgagctgttgctgattgcgtttaaggagggtgatacggtgcgcgcgggataaatcgtgccccaggggcgggcgagaaggcaccgccctagggggatgatggggaggctttacgctaaggcgttatttctgttaccgatgaggtaattttctccagtgattttcctttggtcgctgcgccaaacgcgaccacgataatcaccccggcgaccaaaatgctggtggtcatggtgaacaccccggcaaagcccagcgaggcggaaaacaccccgataatgcttggcgcgagaatgctgccaatgcggccaaaggcgctggcaaaaccacaaccggtagcgcggatagcggtagggaagctctccggcgtgtaggcataaaggcccgcgtacgcaccgttcaggaagaacgacagcactgcggcggacgtcactatcgacacgtggctgcccgactggctgaggaaccacgcgctgatcgcgccgcctatcagatacagtgcgatggtgtgcttcctgtccagccggtctgacagcaccgccgccgagaaatagcccggtatctgcgccagataaataataatagagaattcaaagcttttggtgatggtatagcccttggcgatgagcagtgacgggatccaggcgaaaaagccgtaatagcagaaggtgaccacaaaccagatgagccagatgaccaccgtctgcttgcgcatgctggcggtaaacatcatgccgatcgactcgaaaaagccgagcggcggagtcgaggtttcaacctcagtggcttcggtctgaatcgggacggcaggcaacgggcgtccgagggcgcgttcgacctttttctccagcgtttcaatgacctgagttgcctctttcactcgaccacggttaagcagaaagcgcggtgactccgggaggctgcgacgccaccagagcagcatcagaataggcagcgcggtcatcacctgcgcccagcgccagccgtcctcgaacgacggcacgataaagcggccgatcaacgccgccccgacgaagccaaacgagaagaacccggccagcgcgccaataaaccagccacgttttttcggtgggataaactcgctcagatagggcgcaataattacgctctcggcgcccacgcccacacccgcgaggatcctggcaatcaggaagctcgggtagttggggcgagggcggcaaacagcgtcatgacgcagtagatggcgagcgcccaacacatcacggcttttcggccaatgcgatcgccgagatagccggccatcaacgcgccaaatagcacgcctatcggtgtggcggaacccaccagccccaattcggcgctgctcagtccccacacgctgtgcacggcaggcattaaaaaggcgatgatggcgatgtccatgccgtcaaaggtatagccgaggccaccgatgaacagcaggaaatagtgcggagcacttaggggtaaacggtctaaacgttgcagcaataatgacatatccacggtctcgacgagtagagggacagcctgacagcgcggatgatgccgcgccaatgcacaaacgagcagggctttaaagccgcggattaccgctcaatgatgccactgtttttcacgatttcaccctggcgaataatcagcggcaggtgttttccctgaccactcagcaggctgatatcgcttaacgggcagccgtcaacgacgatcaggtcggcgctagcgcctacgctcaggcagcccacttcaccttccatccgcagcagctgtgccgcgatgccggtggcgctgcgaataacctcctgcgtcggcaagacgcgcgcgcgaatttcaaactcaccggattgatgggtatgcatgtcacccagcaggtcactgccgtaagccatcggtaagcccgcttcatacatgattttcaggctgtcgagacccgaaagcctgacgtcgtcaatcttagcgatggagtccggctgcaggccgtactgcgcgccttcgagttttagcatttcgaaggtcaccagcgtagggcaggccatcgcgccttttgcggcggcgtgggcggcggtttctgaagtgatcaggttacagtgctcgagcgagcgtacaccggcgtcaaccgcgcgacgaatcgcttcatcggtataaaggtgtgcgctaacgtaggttttggcgttgcttgcttcttcaacgatggcttcaagctcagagaccgagaaactcaaaaactcaatcggatcgctcggcgaagagacgccaccgttggccatcaccttgataaactcggcaccgcctttgatttcctcacgcacggcgcggcgcacttcatcgataccgttacatacgcgacccagcgtacccagcttttgggcatagaaatcgacattgcgctggtcatagcggccacgatagtcggtatggccaccggtttgcgacagcgccttgccgcagacaatcaggcgcgggccgttaatcagcccctcttcctgtgcctgctttaaaccgtagtcggcaccgccaacgtcgcgcacggtggtgaagccgcgcatcagcatttcattcatcagttttgatgcgcgggcggcgaccagcgagtccggtaagagggcgttggcgccgaggttggcgctgctggcaacgacgtgaacgtggcagtcgataagtcctggcatcagcgtcttgcccgccagatcgacaacgattgcgtccgctgcgtcaatgggcgtggcggaaacggcgtcgatacggccgtggcgaattaacagctggtgattttttaatggctcggccgaattaccatcaaccagattggcattgatgaacaggatggcgttgtttgaggatgtcgcaggcatagtgctcccgtcttggaattataggtaattatttgattattcggtgatgttgagttcttcacgcctgagtgtttattctctgagcaggctttggcagcatctgtcatctgtctgcaataatgaaatgaaaaaatcgcatgccggcatgcgtgggaggaatggcgtgcggttcagaatgattgatacgatagcgatattatgatgccggagattttactgttataaattaaggatgaacgttacttgaccgagagacgagtattggatatcgccacgcagactttgccccgctggaagatttttttcatcctgttattgccgttgctgattgtgggcgtctgcctgcatccctcggttgcgcgtgcggcaacattgggcgtggtacaaccggtaaccgactgtgccgatttagcggacgtcgatctctccgcaatcggtggacccggcagcaaggtgatgtcggtgcgtgaagtggtaaaaggcgatgtgttttgcgaggtgaaaggcctgctcaagccgactgtcaatttcaccgtactgctgccgatcaacagctggacccagcgttatcttcaggtcggctgcggcggattatgcgggcgcgtgctgctccagctagacggcgcagcaggctgtactccgcttaacaacagcggatttgtgattgctgctaccgacatgggccacgctgccggcgaggcgaactttggcaataatccgcagaagaggcgcgactttgccttccgaagcgtgcatctgaccgccgtggccaccaagaagctcatcagtgcctattatgggcgtgggcccacctataactatttcagcggctgctcggacggcgggcgcgaggcgctcggcgaggcacagcgttatccaaccgattttaacggcatcattgccggtgcgccggtgaccgttttccagacccataaggcgctggaccacggttggaatgcgatgtccaacacggacgccagcggcaacgctatcatcaccgcccgacaattgccgatgattcataaggcagtgctggcacagtgcgacgcccaggatggccaaaaagacgggctgatttccgatccacaaaattgccattttgacccgtcggtgctgagctgtgcagacctgagtgcggataatattgccgggcaggactgcctgtcggaaatgcaaatcagcaccttgcgtaaaatctacggcggcccgcgtgatgccgttaccggacagcggttgaccgttggcgggcctttgcccggttcagaactggcttgggccgggctgtttgttcccaaaaagaccggggatcttaactacagtcagagcgtggcgctttcgaccctgaaatacctgaattttgaaaaaaatccgcccgtcagctacagcctcaaggatttgaagtttacccagcaaacgctggtcgaactgaccaggctgcatccgctctatgacgccagtaatcctgatttgcgttcattttatgccgcaggtggcaagctgattctctggcacggctgggccgatcccagtatttcgccgctcaacacgctggcctaccatcaggcgctggcgcagaccatgggcacggtgacccgcgataagtttgagcggctgtatatgctgcccggggtctatcattgttcgaccggagaagggccgagcctggtcgatttcctgacgccgatgcttgggtgggtggagcagggcaaggtgcccgacggcgtggtgagctatcaggcgacggtggaacagaaaaataaaattgcctctaagccgctgcaaggcgacatgaagctcgattatatcgccgaagatgcgccatcgcgtccggtctttccttatccggactatgccgtttatcgcgggaaaggagatgaccgtcaggcgaccagctatgagcgcaagcgtctggcggttgttcctgccagctatccgtggctgggagataacctgtttaaaccttatcaattcatgaactaaagggtcaggaaatcagtccttgtccgctgagtccttcatattccagtagccagcgtttgaacaggcgggtggcgcgattttcgtgacggtgctgcggcgtaatcaggtaaaatcctccgccctgatgcgctgaggcagcgcaggcgcgcaccagacttccctgcctgagcgggcggtcgatgatacgcttccacgccagcgcaatgcccgctccttgaatcgccagttcgataagcggcggatagtggttgatgcgcagcgtgttactcaggtttattggcggcaggccgttcagctccagccattctggccagccaatccactgacgctgtgcgtcctccagcaccagcagcgtttcgcttagcagctcctgcggcgtaaacccgttgcgccctgccaaatattccggtgagcagaccggaaacatctcctcgtcgaacagacggatagtatcaaagtgaatgatattgctctgtttgaggtaatacatgcccacgtcaaattcaaacccggatagcgtggtgatgccgtcacgcataatgagattgaaacgtatatcggggtaggctttacggaaggcggcaagccgctggggacccagaactgggcaatgcccgacgagcaggccaggttgatttcgttctccccggcgtgacgcatcactttggcggtggcatcggcgcattcttcgagcaaatagcgtacacgatgcaggtagcgttccccggcggtggtgagcgtcagcccattgtgattccgcaggatcagcgtgcggccaagcgactgctccagcgtggcaatctgccgactgacggcactttgtgtcagattgagttcttcaccggcacgcgtaaaactgccgagtcgcaccgtggcctcgaaggcaatcagagtatgcaagggaggaagggggaaagagccatattcactgttctttttattgtgcaaacatgatggctactatgagcaagatgatttgagcggtcaatctaccctgaccttcaggggcagtgctttttcttattgataagccgcgatgaaagtgtccacttaccccccagcacagagcacacaaggcagcaataattcagttgtgacagactttgtcacaaatccccgcagtaaatccgagtgcgtagagaattttcctcccttataattcgccagcagtattcgacgctccattgatgacaacctttttaaatacagagcaatgcatgtgaaaatccgtcttttggtattgagctttttagccctgaatgcaagcatgatgatgcctgttgacgccctggctgccagcaagtctcagccggttgtcgctccccttgttcaaattgcttccggcagtgccatggtggtcgatctcaagacccacgaagtgatttattctcgcgatccggatcaggtcaggccaattgcctccctgaccaaactgatgacggcgatggtgacgcttgacgccaggcagccgctcgatgaggttatctcggttgatatccataacaccccgagatgcgcggcgtgttctcccgcgtaaaactgaacagtgaaatcactcgccgccagatgattcaactggcgctgatgtcctctgaaaaccgtgctgctgcgagccttgctgcacattatcctggcggctacgacgcgtttatccgcgccatgaacgccaaggctaaagagctgggcatgacgcacacccattacgtcgagccgacggggctgtctattcacaacgtctcgaccgcccgtgacttgactcgtctattgatggcaacccgcatgtatccgctgattggtgaactgagtaccacacaggagaagacggcggtgtttagccatccgtcttatgctctgccgttcagaaataccaaccatctgatcatgaatccgaaatggagcattcaggtgaccaagacgggctataccgatgaagcggggcactgcctggcaatgcgtacggtcatcaatggtaaaccggtcacgctggtggtgctcgatgctttcggtaagttcaccgccttcgctgatgccgcgcgcctgcgtacgtggatggaaactggaaaaagcgtgccggtgccgcagattgccaaggtatatcgtaaggaaaaggatcagcgccgcaccgaaccttcggttgagcaggctaccgactaggcatttttgagtcaggagcgcctatccggcaagacgccgtgtcggataggctttatcagcggtaaaagatgaggggcgttaaaagatcagcttaaatacgccagtgatggtcagcagaccaacgataaagataatggcgataatccataaaataattttcatcgtttctccttaggtagggtacatcgcagaataagcatcgctaactcaatgatatcctttgttcaagtatagcccctgtctgaaaaaaatccttggtaaccccctattttctggtattcccctggcgcttttttaggctgaaacagcggctctgagtccgcaaatcgggctggtcagcggcgtgccaaactgggttaattctgccgcacctgccatcgacgcctgcgccaataccacgatgtctgcacccgcctcataggccttatcagcacttgccgctatctgctgtaaatagcctgcgccgttacccgccttaaacatgtcccacgccccggcgacccattcaaagcggacgttggcctgtgcgtagccttcttgctgtgagaaaaggtgttctgtggggcctcgcgtcgtctctacggcgtagagcaccgcaatttcttttccctgcgctaatgcggtttctgccagcgccttgtcgacacgcagaataggcacagtcgaattcagcgccgcgcgttctgcggcagcacccagcgtcgaacaggtaagcacgacgctgtcggcatcctgactgagcgccaaaagataatcagcggtgagctgacagatttcatcggtcagtccaccggctttttcgcaggcatcgagtaagtcagatctgacgtggtgggtaataacctcggcgggaacattaatttgagcggcggcggcgttgaaaacggcaatattgctttcggcggtatgcaggcagtgaatgcgcacggacttccccttgaaatagacgtttatgacatggaatgactatcacaaagttaaagcatttctcccgctatcactggtttttttgccactaaatgctatctatttctatagggctttaagaccgcttaaagcagatgtattatctggttcgttttatggcgcagtaattataaggtctctcgtttaatcgccgtttaattatgcgtgatttgggcgatatttaaccaataagcctgtaaataaatgttatttactatgatcgtataattctctttatataaacatttgattttaaagtgttttaaaatgtaccgaatggtacgaaatgcattactttcatctaacatctccgtataatcttcttcacattttttcggggccctttttcggctccagtctcactcgtcatgtaatgtgcgtaaacaggagaactatcgtgaaacgcagacattttctgacctctctcggtgtgctgttaatcagtactgctctgaaggtcaaagccaaaatcatctcgggcggaatgccgtgggttgttcatgccgtcaggcctccaaagcctgtggttgcaggggactggctgtactttaacccgcttgaggtcgcgacggttgaagccatcgctgaccgcattattcctgccgatgagctgagtattggtggtaaagaagccggttgtgcggtgtttcttgaccgtcagctggcgggagactacggccaggcagtgagcgtttatcgcctaggtccggtaattcaggacggtatccctcaggctggtccgcagtataaagataccccagccgagcgttaccgcacgggtctggcctcaatcaatgaagcgtctaaagcacactacagtggcaaaaccttcagtgaactgacccacgaacagcaggacgatctgctgagcaaaatcgaaaccggcgatattcccctggcgggtgtgaacggcaaattcttcttcgcacagttgattcaaaacatgcgtgaaggcttctttgccgatccgatttatggcggtaacaaagatatggcgagctggaaaatgctcggtttcccgggcgcacagtatgacttccgagacgtcatcgaccgccgcggtgaagacctgcacatcatccccgttagcatggttagcaattacgaaaaatcataataagccggtcaccgaacgggcaaagattcacctggagacaattttatgagcaaaaaaagagagaaggtcgatgcggtaatcgtcggcctgggttgggcgggttcgttgatggccaacgaattgacgcaggcagggttgaacgttgtcgcgattgaacgtggttcatggcgcgataccagtactgatttcccaaccactatcgacaccgatgagctgcgtttcatcagccgccgcgctattttgcagccgaccgccgttgaaaccatgaccttccgtaataacccgattcagcaggcactgccgctgcgtgagttcaatacctatcagtttggtatgaacgtcggcggtgcgggtacgcactggaacgccatgacctggcgcttcctgccaaacgacttccagacctataccaacaccgttgaacgctatggtaaagataaattcctggaaggcatgcaggttcaggactggggcgtaacctataacgatctggaaccgttctacgacacatttgaacgttttgccggtacctcaggcaaggccggtaacatcaaaggcgaaaaaattgacggcggtaacgtcttcgaaggtccgcgcagccgtgactatccgctgccaccgctgaagcgtacccaactgtcgatgatcttcgacaaggcaacgcgcgaaatgggcctgcacccgttcgccgttccagccggtaacacctcaggcgcgtacaccaacaccctgggcatcaacatggccccttgtacctactgcggctactgtgaattcttcggttgcggtaactggtccaagagcagcccgaatgcctgtatcctgcccgccgtgatgcagcgtcctaacttctcggttatcaccgagtcggaagttctgcgcgttaataaagcgccagacggcaaaaccgcaaccggcgttaccttcattggtagcgacggcgtcgagtgggaacagcctgccgatatcgtcgtcatctccgcgtatcagttcgataacgtgcgtctgatgctgctgtccggcattggccagccttacgaccacaaaaccggtgaaggtgttgttggccgtaactatgcctaccagactatttctggcgcgggcgtgttctttgagaacgaaaacctgaacccgtttatcggtgcaggcgcgctggctcaggcggttgatgactacaatagcgacaacttcgaccacactaaccatgacttcatcggcggtggcgttgcgctggttcactcaaccaacggtcgtccgatcactctgtcaggcgccgtacctccaggcacgccgaagtggggcgcgaagtggaagcaggcagccaaagacagctaccagaactacaactcggtctacgtgatgggcaacagctatcctcaccgcgatgtgttcctggacctggatccagaatacaaggaccgtcacggccaaccgctgctgcgcgtcaccttcgactggatcgaaaacgacaaacgttcaggtaaattcatggctgaccgttctgttgaaattggtcacgcaatgggcgcaaaaaccgttgttcgtcaggaacctaccgcagcaccgttctctccgatggacaacctgtcatcgcacaccaccggtggcgcatgtatgggtgatgatcctaagaccagtgccgttaaccgctacctgcaaagctgggacgtgcataacgtcttcgtttgtggcgcatcggcatttgccaacaacggcggctacaacccgacgggtaccgtgggggcgctgaccctttgggcggctgaggcaatcaagactcagtatctgaaatctcctggtccattggtgagggtgtaagcatgggcgttaagaagacaatcgctagcgttgttggcgtagttgctgtcgttggcctgggttttgtcggttacaaaacctggcataactcgcaccagacctacaccttccaggctcctgcctcaaccggaatgaccggtaaaacggctatcgaacgcggtcaatatctggcgcaggccggtgactgtgtggcttgtcacactgcgccgggcggtaaaccgttcgccggtggtcttggactggcgacgccgtttggtactatttatgccactaacattacgcctgacaaagacaccggtatcggtggctggaccgatcagcagttcatggatgcggtgcgtaacggtaaaggtattcacggtgagaacctgtatcctgcaatgccttacaacgtctatgccaaagtcagcgatcaggacctgaaagacctgaaagcgtatctggatagcgtgccggcggtgcattacgacggtcctaaaaccaacctgccgttcccttacaacatccgtctgatgatgtttggctggaatctgctgttcctggataccgctccgttcaaggccgatcctaagcagtctgacgagtggaaccgtggtgcttatctggttgaaggtctgggtcactgtacttcatgtcacacgcctaaaaacttactgggtgccgatgacttcggcgttcatctgcagggggctcagcttgaaggctggctggcgcctgagattaccggcaacaaacgtcagggcgttggcgcatggagcaatgaggagctggtggattacctgaaaacgggtgccaacgacaaaactgtggctgcgggcccaatggctgaagcggtgcacaactctctgcaacacatgaacaagcaggacctgacggcgatggccgtttacctgaagagcttgccgggtagcaaagacgagacccagacgctggtgaactcacaggacgtcatggcacggggtaaagacatttacctgagcaactgtgcggcgtgtcaccagtccaacggtgaaggcgttcgcagcatggtgcctgctctgaaaggcaacaatgcgttgcaggcttctgaaccgaccaacgtactgcacgtgctgatggtaggcgcgcagggcgcggcaacggacagcaatccgaccagcgcagcaatgcctgagtttggctggaaactgaccgaccagcagatggcagacgtgagcacctacgtccgcaacagctggggtaacagcgcaccagaggttacggcggaccaggcagcggcagcgcgtaaactgctgtcaggtgatgcagcactgcataaccctgccaccaagtaattgtttcaagagtcatgaaaggctcccgactgggagccttttttatgtgcgttaacaaaaccttttccacgactcgcaccctcgctaacccgagctatacttggttataaggtcgccacctttttatctctgtcgcatttgagaatttacagagcgaaaggaatgacttttggccgctgtgggcgactgccagcgagcaaggggtgtatcatggtaaatcatgtctggggactgctgtcacatccaggtcctgaattgcaacgcattcaacgtgaacatgaaactgtttctcacgtctattctcatcatgtcctgctaatggcggccattcctgtcgtgtgttcctttatcggtactacacagataggttggaattttggtgatgggcagaacatgcaaatcaccctgcttacggcagcttctatcgcagccgctttctacgtattaattctttgtgccgtcgcgctgatgggccggatcatctattggatggcgcgccggtacgaaagtcgacccagtctaaacagctgtatcgtgtttgctggctatgtggcaacgccgatgttcctaagtgggatagtcgcgctgtatccactggtgtggctgtgtctgttcgtcggcctgataggcctgtgctacagcggttatctgctgtatctggggatccctaattttctcgaaatcgaccatcgggaaggtttcctgttttccagctccacgctggcgatgggcgtgctggtgctagaacttttactggcactgacggtgatcatgtggggatatggttctaaaatattttgattgaggtcaggttattccagtttcaaatgcagtaacagcagtaatatatgccttatacgcagtaccctaaatccccgccggatagctatcttgcggggatttatttttttatgcctgccagtttttcagtttgctggttttgccaatgccggggttaaagctgttggtcgggtcggcctgacgatagaactcctgcaggtgcggtttggcgaaatacagatggccaacgttgtgctctgccgggtactcggcacctttggcatccagaatttccagcatccgatgtttaagcgctttgctatcgacgccttttttgacgatgtaatcctgatggaaaacgtggcacataaagtggccgtaatacagttttgccactaactgctggtcaatgtcgggcgggagcacttcaaaccagtcgcgatcgttgcgtcgcaaggcgatatccagcgccaaaatatcttccacttctttttcatgcacggcgtgataccgcaccgcagcaccggcggccgcaaaacgatgcagaaaagcctttttaccttcatccgccgagcagacaaaaaagtcgccgtctctgtcggcaaagaaatgggtcaggaagttttgcgcttccgccacgccatccccggacattttcaacagcagatgatgttcgtaccgatcgcggtatttcttcatccgtggcggaagatggttgggcagggcgcggctcaggcactgcataacgcggtcactgaaatgtttgggcagaaagggcaccttactgattttggcgtcgaacttacctttggcggtaaatatctcaggcattttgtcggtgccgagtttgtctatcatcaaaaaggtatctttgccgtagacctcggtaatatcaaaaatatcgcgatgcatatactcaccggcgaccggcagattgttgaactcaccgagtatgctgcggcgtaaatcggtaagcacggcggtgctgtccgtgccgatataaaacacctgttgttgagtttcggcctcgaaggtgtcgagcctcacggcaaaaatggctaacttaccggcgcagcctgaagcttcataaaggcggcggctgtcggcgttgaagcgtgaaggcgtgtcggcatcgacgtcgcgcactcgctcggcatagtcgtgatcggaggccagtagatcaccgtaatgaatatcggcggggtatagttcccctgctcaagacgggtgaggatctcttccggcgtcgcgccgaggtcaatgcccaaatggttgataaggattagctttccctgctcatctctctgggcatacagcgccagctccgtataggccgggccgcgtttcaccagcgatccgcccgagttgttgcacacgccgccaatgaccgacgcgccaatacaggaagagccaatcaccgaatggggctcacgtcccagcggtttaaggcgtttctcaagctcatacagcgtgctgccgggaaaaccgatcacctgcttaccgtcatcaagcagctgaatgccgttgagcttcaaggtgctgaagataatgatatcgcgatcgtaatcttcgccgctcggcgttgagccctcggtcaaaccggtattcgcggcctgcatgataacgattttgtcggcctcgacgcaggcctgtagcagctgccactgctggagcaaggtctgcggaaaaacaaccgccagcgccttgccgcctccggaacgaaagcctttgcggtatcgttcggtctggctttcggaggtcaatacgtgacgacctccgacgatatttttgagccgctcaatcaatgcggcgttgctctctggtgtggacggatgctgaagagtcattctgcctccctgtcgttgtttcggcacatttttgccgttagcttgcctctaatcataggcttaattgctatttaaggtatttaagatacgttttatcaatggaagaaggtcatctttcgtccattaaaacatcatcaatctgtcatagttgtcgcgcttaatggacgtcagaatctgcacgtaaccggagacagcatgatggcgcaagctcaacttaagctggcacaggctgaatatcctcaggccgagccacagcatcagaataaagtgttagacgttaaaggcctggttaaatcttataaatcaggcagtcgtgtgcttaatgatattaattttgaactccacgccggtgaatttgttgccgtgattggccgctcaggcgcgggaaaatccacgctgctgcacgtgctcaatggcactattccactgagtgaaggcagcgtggtttgccactatgacggtggtgaaaaacaggagctggcgggcctgaccggcaaggcattacgccgctggcgagcgggctgtggcatgatttttcaggatttctgtctgatacctcgtctagacgtcttgaccaatgtgctattgggacgcctgagccagacctcaaccttcaggtctttcttcaaccagtttgatgatgaagatcgtgcgcgagcgatctctctgctcgactggctacacctattgccccatgcgctacagcgcgccgaaaacctgtccggtggtcagatgcaacgggtagcaatttgtcgtgccttgatgcagaaccctaaaattctgctggctgatgaacctgtcgcctcgctagatcctaaaaacaccttacgtattatgaatgcgctgaaaaagtcagcgaagataacatcgccgtcatggttaacctgcactcggttgaactggttaaagatttctgtacccgagttattggtattgcccacggtgagattatttacgatggacatccagactatttaaccgattcgattttgcaccaactgtatggcgaagagagtgaagcggtaaacggttaatgattaactgttaacaattaatagttggccgtcattctatttgtcatgccacggatggcataacgtatttgctttcacatttatctatttcattctaatttaatcaatctacacaagggttattattacatgaagaagctattacgtctggcggtattcgttgcagggaccatggcagcaatgaatagcatggccgcagatgcaccaaaagagttaaacctgggcattctcggcggtcagaacgccacacagcaaattggcgataacatgtgtgtaaaacagttctttgataaagaactgaatgtagatacaaaattacgtaactcttctgactattctggcgttattcaggggctgttgggcgggaaagttgatatggtattaagcatgtcgccttcttccttcgcgtcggtctatcttaataatccgaaagccgtcagcatcgaaggtattctggttgatgacaccgatcagtcacgcggttatcactcggttgttctggttaaagccgacagtaaatataaaaagctggaagacctgaaaggcaccgcatttggttttgcggaccctgattccacctcgggctatcttattcctaacgcagccttcaagaagatgtttggcgggactaccgacaacagctacaaccatttcttctcgagtacgaccttctctggcggtcatgaacaggatattcttggcgtgctgaacggccagtttgctggtgctgttgcttggtcatcgatgattggcgacccgtcaaccggctatacctcaggcgcatttggtcgcatgatgcgtatggaccacccggacctgatgaaacagatccgtatcatctgggagtcgccgttgatccctaatggcccaatcctggtgagcaattcgctgcctgctgatttcaaggcaaaagttgtggcggcaattaataagctggataaagatgatcacgcctgctttattaaagccgtcggcggtaagcagcatattggtccggcaacgctggccgattatcagcaaatcatcgatatgaaaaaggcattgactgaaggcggtcgttaaacctcagactctcgacaaccacgcgccatattattggcgcgttatttttatcaggcagtgcagattattatctccgccatcaactgtggaagccttattttgaatactgaatttcatcattattaccagcaaatacgcagcaagcaaaaaagagaggcgttaatttggtctggcttgatgttagtcctttatttatgggcggggagtatttccgagcttaatttaaaaacgatattcgtcaatgcgccacacttttttgactatattggtcaaacggtgcccactttacattggcacgatctgtttgccgacggacataccaaaggttctctggcctattggggttatcgtttaaacattcagcttccattgatttgggaaactattcagctggccttttcgtcgaccattttgtcaaccgtgctcgctgtcgtgctggcctttattgcggccaataataccgattcgccgaaatggctaaaatttagcgtgcgtaccttcgtggcattcctgcgtaccatgcccgaattggcgtgggcggtgatgtgtgtaatggcgtttggcatcggcgctatccccggttttatcgccctgacgctgcataccgtcggtagcctgaccaaactgttttatgaatcaatagagaccgcctcggacaagccggtgcgcggcttaaaggcgtgtggcgcaggacgcctgcaaaggatgcgttttgctctttggccgcaggtacagcccatttttctctcgtacagctttatgcgccttgaaattaacttccgccagtcgaccattcttggtctggtaggcgcgggcgggatagggcaggagctgatgacatcaatcaaactagaccgctatgaccaggtcagcatgacgctgttgctgattatttttgtggtttccgtgatggactatgcctcgggcaaactccgtaaacgcgttgtagagggcacattctgatgcttaccgattctttgagcgccactgaagttgcgagcattcgtcagcaacatcgccatctttttgcggcgcagcgccggaccttacgcgtgttggccatttcagttgcggctatcgtgctttattacctggtgttcttccatttctacggtatctccgtgggccagttcacgcacggctgcggtgagatagggaaatactttttgcgcatgttcgtctggcagaatttctcacagtggccgctgatgtattactttacgcagatagcgattaccttggcgattgtgtttgccggaaccgtaaccgccactattctagccctaccgctgtcatttttggcggcgcgcaatgtgatgtccacgcctttcctgcgcccaatttcactggttgtgcgccgcattatggacgtcttgcgcggactggacatggccatctgggggctgattttcgtccgtgccgtggggatgggaccgctggccggcgcgctggccatcatcatgcaagatttgggtctgttggggaaactctatgcggaggggcatgaagccgtagagcgttcaccgagccgtggactgcgcgcgttgggggctaatccgctgcaaacccaccgttttggcattttcacccagtcgttcccgacctttttggccctctcgctttatcagattgaatcaaacacccgctctgcagcagtgttgggatttgtcggtgcgggtggggtgggtctggtctacgccgaaaatatgcggctgtggaactgggacgtggtgatgttcattacgatgattctggtggtgatcgtgatggcaatggacaaaatttcgtcgatgttacgcgcaaaatatatcatcggtgatgaaattgatttgtataaaccggaacaaaataaacgtccgaagattgagctgtaccgttcggaatgaaaaacgccctcccgaaggggagggcggctggatgaccgtcaggatttttcggccagaacgaccagtttctgattcacaaattctttgatacccaagtctgaaagttcccggccaaagcctgaacgtttcacgccaccgaaaggcagttccggcgcagtattggtgagtgaattcacgtaaatcatcccggtctcgattttcgaggccagcttacgagcacgagtgagatcgcgggtaaacagcgcaccgccaaggccgtaatgcgagtcattggccagtttcaccagctcctcgtcatttttcaccacgtagacctgcgccaccgggccaaagaactcttcaaagtaggccggattgtcgcgcgtgatcccggtgaggacagtggcctcaaagaagttacccggattgttgcttaccggttcacccccaacgagcactttcgccccatgtttaacggcttctttcacctgtttagtcagcgtgttaactgcatcggcagaagagagcggaccgagagtggttttctcgtcgagtgggtcacctattttcagctctttaaagtgctgagtgaattttttcaggaattcatcggcgaccttctcgtgaatgataaagcgtttggctgcagcacagacctggccggcattggcaacgcgcgcctgagcgcccaccttggctgcgtggtcgatatcagcgtcttcaagaacggcaaaaatatcgttaccgcccagctcaagcgttgattttttcagtttaccggccgcacgtgatgccaccaccgccccggctttttcagagccggtcagggcaacgccttgaacgcggtcgtcatcaatgatggccgatacctgatcttgtgaaataaacaggttggtatatgccccttttggcgcacccgcttcggtaatcagtttctcaaacgtttctgcactgtgcggcacgatgctggcgtgcttgaccagcacgctgttaccggatgccagattgggcgctagaacgcggataagctggtagaacgggaagttccacggctccacggccatgataaccccgatagggctgtgctcgacccaggcctcacccaggtttgacttataggacaccggtttaagaaattcttccgcattttcggcataatattttgcgatatcggcggtgagctgaacctctgcacggctctgctcaatcagtttgcccatttcgatactgatgcctttcgccaactcttctacgcgtgacgagataatatccgacagcttgtgcagtacgttgaggcgttgcttgatatcgccctgtgcccagtcggatttatacagttgatgtgccgtttccagagcctgttcgacgtgccgatcgttatgcgtttgatattctttgatgagcttattgttgaacgggttgatggtttgataaggcatgaattgctccttgttttgccgttcagagggggaaatcactgttgatccctgaacatgaattgaggtgcgaaattcagcttttgctgcggctgactgtcaagcatagtcgaatgagagagtctttttggtgtttggctgcggttcggggcttttaggagttgtccttttcctgaaggtttggctcaaatttagaatctttgcatcagccgattgattgacggacgattcacttctattctggaattcccccaattgtatgagactgaaatgaatttatcctctattcctttttgtaccaccgactggagccaaattgaacctaccgagcatcagggtgaaatcggcatggcgctttggcgaactcagcactttggggatgacgcacagccaatccgcgtcaggattgttgaatattcggcgggatacctggccgatcactggtgtaagaaagggcacgttttattttgtctcgaaggtgagttgcataccacgcttgaagatggacggtcgttcatcctcaaacccggtatgagttaccaggtggcggataatgcagaagcgcatcagtcctccacgccctctggagcaaagttgtttatcgtagactaagcgcggttaatgttgattaagagcagttttgaaggagtctagagtgagtaaattacgcgtgggtatcatctttggaggcaaatcgtcggagcatgaagtctcgctgcagtctgcacgcaatatcgtggatgcgatggacaagcaacgtttcgaggtgactctgctggggatcgataagcagggcgaatggcacatcaatgataccagtaactatctgattaacgccgaaaacccgtcattaattgcgttgaatcgctcgaatcagcaggtcgcgctggtacccggtcttgaaaaaaatcagcttattgacacccagaatgcccacgcactgtcgcagcttgacgttatttttccgattgtccatggcacgctgggagaagacggttcgttacagggactgctgcggatggcaaacattccctacgtcggttccggcgtgctcggttcagcggtgtgcatggataaagatgttaccaagcgtctgttgcgggatgccgggctcaacgtagcgccgtttattaccctgactcgccgcactcgcagccagcacagtttcgacagtatcgttcagcagcttggcctgccgttgtttatcaaacccgccaatcagggatcctccgttggggtcagcaaggtcaaagatctcgcatccttcgagcaagcgttggacagcgcctttagcttcgatcataaggtattggtcgagtcggcaatcaaggggcgtgaaatagagtgtgcggtgttgggcaatgattaccctaaagccagcacctgcggtgaggttatcctcaacgatgagttctactcctacgatacgaaatacatcaacgagcagggcgcatcggttgcggtaccggctgacctggctgcagaagttaatgaccggattagagagatagcgattcaggcatttcaggcattggaatgtcggggcatggcgcgcgttgacgtgttcttaacggaaggggagaggtggtgattaatgaaatcaatacgctgcctggcttcaccaatatcagcatgtatcccaagctctgggcggccagcggattggattacacttcacttattacccaactaatagaattggctatcgagcaacactcgcaggactgccagcttaaaagttcggcgcactgatttatagaaacgaaaaaggcggcaatcgccgcctcttctactgactgctgtctgacttatttatacagttcagcggttccgtacaggtaattgtcaccaccggctgaaatgatgcggtaagaagtcgcaccttcctgagccgccttggccgccagtttaccctgcaggctggtcaaatcactggccccagtgcttgcacttaccacaccgatgctttgttcaccggctggagctgaactgacttcggtcgccgcaaaagtggcgaatgaagccgtactcagtgcgataacagcaaatgctttagtcaggtttttcattttattgtcctatttattgtcgttttgcttaatttctatgacgacattgattgtcgttcgcttgtgaaatcaagcctcaatactgtccgatacacattggctgccttttaacctgcgccgaccgaatgtgtgatacccatacttctatgacgatttgaatctaaggcttatttgtagatttcagcggtaccgtacatgtggttttcaccaccagccgcaacgatgcgatatgaggttgcgccttcttgagcggctttagcagccagtttgccttgcagcgtactcaggtcaccgccgttggttgatgcgctaacggtaccgatgctctgttcacccgctggagccatactcacttcggtagccgcgaaagtcgcgaatgatgcggtgctcagtgcgattactgccaatgctttagtcaggtttttcatggtcttaattcctattctcgttgtcattagacttaatttttcgctgacgatattgtttatcgttcgttaattaaatattaagccttgtctctgtccgatgcaaattatttatttaataaccgttaactaattgtgctactaccgtaagacttatttgtagatttcagcggtaccgtacatgtgattttcaccaccggccccgacgatacggtatgaactcgctccttcctgggccgctttagcagccagtttggcttgcagcgaactcagatcaccgccgttggttgaagcactaacgacaccaatgctttgttcacctgcaggagctgagctaacttcggtagcagcgaatgtcgcaaatgaagcggtagtcagtgcgataacggcaaatgctttagtcaggtttttcatgatggcttcctcattatctggttagctgaaacgttgtcttatcgagttcagcgattgatttttgttcgtcgttattaattaacgttcgataagttaatgatagagactgaacggattctgtgcaatctatttttatattaatcgttaactaattgtgcggttcgtttaatggggtgatcagtccacagcgaaatcgttaattaaggaaaaggtggccgtagccaccgataagtgcctgtattaattgattgattaaactgaatttatttatagatctcggcggtgccgtaaagatggttctcaccgcctgcagaggtgatgtgataagaacgtgcgccttcttcagaggcctcactggcgagattacgctgaagtgcgctgaggtcgtcactgttggttgaggcactcacttcacctatcttgtgctcgccattaggctgtgagctaacggcagtagcagcagcaagggtggtgaacgaggcggcactgagggcaataacagccaatactttggttaaatttttcatttcagttctcctttagtctttcaccctgcctttttacctcttttttcttatcgaaaacttaaatctcaaagcttgcacataaacttcggcactctcatacaaatggctttatctctgaaagatttagctaaagataatttgcgaaaacaagacattagctgacaattgaacgcgaaaaaggcggcaaatgccgcctcttctctttttcacgctcttgctacaaaagcttatttgtagatttcagccgtaccgtaaagatggttctcacctccggcggccacaatgcgataagagcttgccccttccagggcggctttagcggccagtttcccctgtagcgtacttaaatcaccgctgttagtggacgcgctaacctcaccgaggctttgtgctccctgcggagctgaactcacttcagtggcggcaaaggtagcgaatgaagcggtagtcagggcgataacagcaaatgctttgttcagagttttcatgatggcttcctcattatcctgtagaccgaacccgctattttttgagggtcggaacctgtttttttgggtctacgatattaattaacgttcgataattaaatgatggtgacggatcgattcttgtgcaatttttttttatcaatcgttaacctattgtgcgggtcttttttggagaggggtagtgaggggattttgggagatataaaaatgaaaaaggcgacaactgtcgcctcttcttcatacttataacacgttatattttaaacattatttataaatttcagccgtaccgtaaagatgattttcaccaccggcagagacgatacgataagagcttgccccttcctgagcggcttttgcagccagtttaccttgcaatgcacctaagtcaccgctgttggtagaagcgctaacctcacccatgctctgtgcaccttgaggcgccatgctgacttctgttgccgcgaaagtagcaaatgaagcggtagtcagggcgataaccgcaaatgctttagtcaggtttttcataatattttcctctatatcgttttgcttaatttcggtgacgccatgattgacgttcgatgtgaaattaggcgtcttactgtccgatacatctctccggcaaagttctgctgacaagatgcgaatacccatacctctttattcttactctgctgcattcttactctgctgctaaaaatgattcatgcttatttgtagagttctgcagtaccgtacatatggttttcaccaccggcagaaacgatgcgataagaacttgccccttcctgggcggctttagcagccagtttgttctgcagagtcgtgatatcgctaccgtgagttgatgcgctcaccataccaatactttgttcgcctgctggcgccatgctcacttctgttgctgcaaaggtggcgaatgaagctgtactcagggcgataacagcaaatgctttagtcaggtttttcatgattgcttcctcattatcgtgttagccgaacgggatactgctcgagtccagcgactaatttctgcttcgtcgttattaattaacgttcgataacttaatgataggatcggatcggaatctgtgcaatttatttttgtattaatcgttaactaattgtgcggatcgccagtaagcccatgtttggcgttagtttagtcatgcttgatcctgttttatcgatgttctctttttgctgcctcgatcgagcgcaaagcgagggaaagcatttcccgacgtgacggtgaagcttattagcgatacagctcggcgcggccgtagaaatgattttcgccggtggcgaaaattacgcgataggaggtagcgccctgcgcgtcggcctcgtttgacattctatgtttaagtgcactcaggtgatccccacccgagacgtttatcactcccatgctgacctgacctgctggtgctgaactcacctcggtcgccgccaccgcggcaaatgaagcactaatgagcgcaacagcagccagagtttgataaaaagttatggtgatgtttttcacgatgatttcctcgttattggcacaattgtcagcgtggccactgtgagtccatcaacgaaatctcttcggtaggacacatggtcacttttattaatattcattaaataaagcgtagtggtggtatgcctgccctgccaccaaattaaataacgattattaatttaattggcgttatttaactggcgaagatgaaaatatccgatttaaatatcttgttaatatattgtttttaaatggctttatataagtcacttttctcctttcgctgcattttgatttaaaagctatttttgacataaaaatgccagcccgaaggctggctgataaatttaaacgggtgctttggacctttgtctgacaacctccaacggacgggagcgagctcccgcctgttggattgcttacctcacggattcgtaggccgatgatgcaacaacctctatccaaatgctcttcaccttaacctcacaaagtgtatttcctttcatccaggtgaacgctaaaagactcgcacagatgaaaaagaccagcagaacaatcgttatagatgtgaagcgcacatagacctccttttccttgcattcctgcatatgaggcgctacctttacgttgttggacataagggacgcctcgagttgatgtaatatcagttcggggcttttctcattctgtccctgcataaattttatttcatgcccagagcagaaagatcctgagcacccgcacaaagaagatcagtattgtccctctgttgttattatattccccatttaaattaatcgattaaatttataaaacggttggtttttgtggttggtagagccggtggtgaaattaaaaatcatttattatcttttggcgttgatttaattgctctatggtttttataaaacaatgtagggtgtgaaataaaagaatattttatttaattggcgtagagcagtaaaggacagctttattggtttaaatattaacctgactctatccagcaacgaaatatctttgaagaagacaaattttataccctatgaaatgagcaggctatcgataaccctctgcttgctttggttttaccgatgttaaaaaaggcggccacggccgcctttcgtcattatctttatcaggcttatttatacagctcagccgttccgtacaggtggttgtcacctgaggctgaaatgatgcggaaagagcttgcgccagcttcttcagctttagcgttcagattacgctccaggcttgagagatcgctactggaggtagctgatactacacctattttctgtgaacccgctggagcctgagtgacttctgtcgcggctaaagttgaaaatgaaccggtagccaaggccagtgctgcaaaaatcatggttaagtttttcatggtgtctaatcccataggtgatgaacatgcgttcttttattcggcggaacgctattagttaacgttcgataattaaatgttaatctccaggggccaccttggcaatcttttttattaatgatcgttaactaaatgtgctgtgaggggctaactcacagaataggaaagaaatttctgcgcataaatcagttgggtgcctgaagtcgcctgcggattacctaaggtgataagggttgtgaaatatctgcattaaatgagccgtgtcgtctgtcgtactctgtatttctgcttataacttattcaatctcattgcttttttcattatcttgcaatggttattcaatataatcattcggatttggcatccaaaaagtttattttaatagccgctaataaattcttgaggtacgaggatgagggtgttaaaaaagaaggcagcataaaatgctctgccttctttatgggtactcaggcttccttagttgtagatggcggaaggtgagttatgtgacgcaacaggagccggcggtatggtcggtgaactcgagataccaggttgtgctggtttcctgttcagagtgccatgcggaggctgtacgacattactgtcgccagtcacgttaaccatcgcgacctgctgagtttgtactggcatcatgattgtctgctgtgcggcaacgttagcaaccggcacaacggccaatgccattactgcaagaatcaatttgatgtttctcatgatgttaggtcctgggttactgtcttatagctgagtagttttctgtagggagtgatttacttatcgctcgataattaaatattaatctctactggacttctgcgcaactatttttaataatgatcgttaatttatttcgacaaccataatcacaagagtgatgaaaggagggtgtatgagcactgaacagacggcattagtccggaaaagtcgcggtcgcccaaaacagttcgatcgcggaactgctctgagtaaagcgttaaacctgttctggcgtcatggctatgaagccacgtctttggctgacttagttgaagcaacgggtgcgaaagcgcctactttatatgctgaatttggcaacaaagaagggttgttccgtgcatcggttgaacattatctggcaaccttttacgaaaagagtttatgtctgctaagcagagatgatttgtcggtagaacaggcagtagagcagtatttgcgtaccacggccgagatgtttaccgactgcgacacgccgagcggctgctttatcattaacgcagcgtcgggcatgtctgcagcttctcaggaaatttctgacatgctacgttcacgccacctgtctcaggagcgcaccttgttcgagttttttgagaagaaaaaactgagcggcgagttcccgaatgattccgacagttctcttttggcgaaatacgtggcgaccaccgttcagggaatgtcggtgcagtcgcgagacggtgccagcaatgaacagttgggcgctattattgacctgtttatgtacgtatggccgcaactgcgcaccgttccgatgtcgagcgcgattgcccactaagcctttgacgtagcgaagaaactttcatccctgtatgccttaggcacgccttattgtagaaaatattgagaacaatgtgtcatgccagttggtgaaagtttacgtaagaagatagagcgccaggtgttaagcatttccggcctggcgctgggaggaatcgatttcgaacagcctcgtggtgatgccgggttatttggacccgacaccgtagtgtggcaagttcacggcgatttctcgaccatgttgtgcggcggcgtgagtgcactgctgctgcaaatgcttcatcctcttgctctggcgggcgtgtgggaccattcgaactttcgccaggacatgctggggcgtctcagacgcaccagtcaattcgtttctggcaccacttttgcctctcttgcagacgctcagcgtcttatcgaacgcgtaaaatccattcatcttggcgtgaccggcgtcgatgcgcacggcaacccttatgccgccagcgatcccgatttattggtgtgggtgcacgttgccgagtcctacagctttctccagtcctatcttcgctatcgtaatcccaatctcagcctcgccgagcaggaccagtattaccgtgaagtcgcgcgtgtggtcgaggggttgggggcgtcaatgtgcccaccagcgtgaaagaaatcgacgattatctcgagcgcatgcggccctctttacgctgtgatgagcgcacgcttgaagtggtaaggctgctaaaaaacgcgcccgcacccagccgagccgcggttcccgtgggtaagctgatgatttggtcgggcattgaactgttgccgcagtgggcgcaggacgagctggggatcaggttttcgccgttgatccgcaaaggcatcgacttttcaatgcgtcgcatcgccagcgtgctgcgctgggcggtgagaaacggttcctggacaagagcgatgcggcgcgtcggacgattgccctagcgccgcggcgttcagacgattacgacggcatgtgcggatacacgcccggaccaatcggcaggcccaacagataccagacgaccagcatcagcagccagaccaggaaaaacaccaccggatacggcagcaccagcgaatagtaagtgccgagcttagcgtccttgttgtaacgctgtagaaacccgagaaacagcggcaggaaaggcgacatcggtgccagcggcagcaccgaggagtcagcgatacgaaatacaatctgtgcaaatgcgggatggaacccgatcagcataaacatcgggataaagatcggtgcgagaatcgaccaaatcgccgaaccgctggcgataaacatgcacagcagcgccgacaggaagataagccccacaaacgccggaatacccgtcatcccaagcttctccagcacatcggtcaagccgatagccataaatttccccatattgctccagttaaagaacgccacaaactgggacagtgggaaaaccatcacgatgaaaccggccatgcctttcattggatcgatcagtagattagggatatcactctgcgagcggatctgtttcgtgaccaggccgtaagggatcgagacgacaaaaaagaataggataatcagcggcacaatgccctgaataaacggcgaaggcactatcccgtgggtgtggggattacgcagcggagccgactccggcactaccagcatggccaccaacgcgataaacaccagtgcggcgataccgctggcccgtaacccgcgattctgcagggcggtgagctttttcatttcctcgctgcgatcgccgtcgtaggccggcaggcgcggttcgacaaatcggtcggtcagaataccgccgaccagcgtcaatacaatcaccgatgcggccataaagtaccagttatcaaccacgctgacctgcaccgctgggttgataaccttcgctgcctcagaactcaaacctgacaacaacacgtcagtcgtcacgatcagcaggttagcggtaaagccgcacccgacgccggcgatggccgccagcagtccggcaaccggatgacgtcccacggcgaggaagatgagcgctcccagaggggcattaccaccagtgcggcatcggaagaaatatggctgaaaaaagcaatgaaaataaccagatagctcgcgtactttgcgctgactcccgccgccatcttgtacatcaggctttgcaatagccctacgcgttcggcgagtcctgcccccagcaccaaggccagaatcgaccccagtggcgtaaacccgctgaagtttttgaccacgttaggcaagatccactgtaacccttcaacgctgagcaggtttttaacgtggataatctcaccgttggttggattaactgcggtgatgtttagccaggaaatcaccgcgctgctcagcattaacacaacaatcagatagacaaacagaaggaatggattaggaattttgttccctacgcgctcgacccaacggaagaagccgcccgggctatgttgttgttcctgtgcttcaatactcattaaaaacccctcgtcgaaaaaagtgatcacgttaatttccgccggtcgtgccgtgcggttttattatttttttatgcccggccccgacgatgaggaaaggtcgaagcagggcagtcgatctttgtagcgttttttacttcaaaggtgaaggcttaatgccttccgggatcggacagtgatagggacgtcgcgcacgcaccgcacgatgttcctcctggcaggcatccagcagcgccgagtcggagaacagcgcgacggcagtggaggccatgactttcgccgcgagacacatgcctttatgggcaagagaggttctgccctgtgacacaatctgccaggtatgcagcggtgaaccgaccacgaagcaggggctaaagcactgcgcggtagggactatccagcttacgtcgccgacgtcggtggagccgtaaaggatattttcattggcacagtagggtgcgacggcggaggttagcggtgaatggcgcagtgtctcggcgaaggctttgcctgcgatgccgccggttttcgccatcgtattcaagctgttatcgatgtcctgttcgctgagtgtggcgtggattgaacgggcgaacgcctgctcttcctgactgtattgcggcgtgccgaaggcctgcacgtagcgatacatcacttcttccagcttatggttggggcatagttggagcaggccttgtcgaagcgcatcgtcatgcgggtgccggtcatcagtgccgcgcccttggcgatatcgactacgcggtcaaaaatggcctgcgcctgatcgagctgcggtgcccgcaccagatacagcacttcggcgtcggcctgtaccacgttcggcgagataccgcccgcattggtcaccgcgtaatgcacgcgtgcttcctgaataatgtgctcacgcaggaagttggcaccggtgttcatcagcgtcagggcgtcgagcgcgctgcggccaagatgcggggcggcggcggcgtgtgcggcggcacccttgaagtggaacgcggcctgaatattggccagcgtcgggttgctgaacatgccgctgaaggtttcggggtgccaggttagcgcggcgttcacgccgtcaaacaggccttcgcgggccataaaggttttgcctgagccaccttcctcgcccggacagccgtaaaatcgtaccgtgcctttcaggccttctttctccatccacgccttcaccgccagtgtaccacccagcgccgcggtgcccagcaggttgtgaccgcagccgtggccgttaccgttctctaccagcggctgctcgctgtcgcagcccgccttttggctcagtcccgccaacgcgtcaaactcaccgagcagagcgataaccggctttccctcgccgaagctggcaataaacgcggtgtccatgccgccgacgccgcgctcgacctgaaagcctgattcctcaagtttgtcggcaagcagtcttgaggagatagactcctcgaaacgcgtttcaggatggtcccagatttcatcgctgatagccgataatacgtcgcgttgggtatcgataaaatcgtcgacaaagctgataatttcttgattggcaagcataatcaatgctccttgaatgagttgatattcagcgccagcgcagccagcgtcttgattccctgagtcatgaccttctcatcgaaatcgaatttctcattgtgatgtccagcactaagatcggtgccaaagatgacgtaagaagcctgaccgcccagtgatttgacgcgctccatcatgtaggtggcgtcttctgaaccggcagcgccttcctgacggtcgataatctcttcaaacagacccaactgctcggcctgacgatggatgtacttcacccatggctcggtcggcgtgctgctctgagccgctcccatcaggcgggtttcgaactgcacctgatacatctcggcggcaccggaaatcaccttcagcgcctgctgataaataaactcgttcacctcgttagtcgccccacgggtttcgaccttcatcatcgcgctcgaaggcaccacgttacgaccggtgccggcctggagtacgccgacattaatccgcgagctgcccgcgctgtgacgcggcagggcgtgcaggccgagagttgcctgtgccgccgccagcagagcgttacgcccttgctcagggttgccgcccgcatgcgcagcgacgccggtaaagacgacgtcgagtttggtggtagccataaaggtatcattgccgcagacgatatgattggccggcacaccggtgccgatatgcacggcggtaaagaaatcgacgtcatcgacgacgcctgctgccaccatggattttgcgcctcgcgtgccttcttcggcaggctggaagataagcttaatggtgccacacagccgatcgcgcagttccatcagcagctgtgccagcccgagcccaatcgtagtatgcccatcgtggccacaggcgtgcatcatgccgccattcagcgaggaaaaaccctcacgataaggacgatggtcatcgttctgaagctcattgaggtccagcgcgtccatgtccacgcgatagccgataaccggacccggtctgccggtctcaagcgttgccacaattcctgtgaatccgccggagaaatgaggcatccagcgtgcaattgcgccttgttccaatgcgcgctgctcctgctgttgcaggacttcggcagacggaaggcccatacgcgaatcggcatcgatcacctcacgccccagttgcaggctgtagccgagttcgctcagacgctcggcaacaatcgtggaggtacgaaactcgagccagccggattcggcatatttatgcaaatcgcggcggcgggtctggagatcggtaaaaagtgtatcgacgcgttttgacagcgcctgtagggaagatggtgcgctcaattcggatgcctctgtaaccatgattagctctcttttagtcgcggtaagaccgatatttttcgaagatgagatgtgacactttgatttcaatgtacacaaagcgaccatggcgtataagatgccaaaatcttaatggtgataatcaggggttatcagtcgcggtcatgtcatcacaaataaaaatgcatcaactgcgcgcttttgtggctgtgagccgtcagggaagtattcgcgccgccagccgctttttgagtctttctcaaccggcattgaccaagtcaatcaaggagcttgaggacagcctcggcgcacagctgtttattcgtcgacgtcagggcgtcacgctaaccgaatgcggggagatttttttcaagcgggccagcctgattcttgaggaattacgcgtcgcgcaggaggatattgcccagcgccttggtacgcacagcgggcaggtcaacctcggcgtcggggccagcattgcgcgcaccattatgccgattgtcatagaccgttttcatcgcgagtttcccgaggtaaaggtcaggattgccgaagggcagttggtgtcgatgatcccggagctgcggcagggagagttggacttcaccatcaacacttattatcaaagcgcctatgataacgaactgttatatgaaaaacttatggataaggagtatcgggtggtgtgtcggcgcggacatccgatggagaaggctcgcagtataaaagagcttctgcactgtgactggaccatgccgacgccgcgcggcagctattacaagctattgagcgagatgttcagcgaaatggaagccgagccaataatcagcgtggtgtgtgagacctttatgtcctgcaccagcctgttggcgaagacagattttctgagcgtgctgtcggtcgatatcatcaacgaccccctgcttggccagagcctggtcgcgctggatcttgatctgcctctgcccaaggcaacctttcatctcatccaacgtaaagactcaacgctgtcgccgatggccgcgcacttagcacagcttttccggctttactgccgataatgagaaaaatggcgcaaaaatcaccctattcaaggcgttcaagccgagttttgggatttttgcccgttaacctgatgctgaagacgttctacactttatctcatagaataagaagcgactaatcctattgaggtagcatgcgccagtcagaaatactcgctcaggtcagcaacgataaacagaccctcatcgccatggtcgaacaggacgacagggtcgcttatctttacatctatgcgcgtgaagacttacgcgatcgctttccgcgaatgcgcggctgctgggtgagaaacctgtctccggcaccagcacaggacgacgcgcaggcgatggctgaaggcttgccaccgatgttggcggcgcaatattgtcgcagccttgaggccgaggcaccgctggatcccgaagggattcaaatcctgtggaatgaaagcgacgacggcgcggcgctctggtatcacggacttctcttggcggttatccccggttggagcctgtatatcgaccactcggtcagctattccgccgggtgcattcagcagaactccttaaccttccccctgggctctgcctcgaccaatacccaatacgcgctggcggacaaaacccggcaattctggcgcgactggcagcataacgagcacaatccctggcctaaacaccagcgtaatttcatcgcctgctatgaacaacgcttcggcccggcggtaaaatattacgctatcgatcagggcacgtggccgccgatggcgatttcacagcatgaagatgacgagaatttctacttcttcaccctgggcatgagtatccgcccgatgccgcagattgagctgatttttaacgatgaggctgagcatcatcgtcgtatcgaactggcgtttgcggtcggcaaagagtacgtcgatgaggccaatgcggtgcagatggcgagtgcgatgtcagagtatgcccaactgccctggacgacgctgagttggctggggaggggcacacgctgctttcgccggttgcgccgttaggctatgaaggtcacgtggtgtcggcggagttaggcgcaccgctcggaaaacttgagatgccgcgcagctacggcgatccggttaacctgttttggataagcccgatagtggcgaccgaactcgagttcgcgcagagccgcccgaacggtgggcacgcgttggttgcgatgctgaccgaggcgggcgtacagccggtctttgcgccgcgcgcaccggtagtttgatacatccgctcctccatttttaatccacgggggagcggactgttactttttatgccttgaccggttcgaagtcttccgcgtcgacgtcatagcctgaaggttcccaacgaatagccagcagcacaatcagccccgccagtggcgcaaacgcgataacccagaatacgctagtgccgagtgcggcagagagcacggggaaaaggaacagtgacgccgtcgagctggcgcgaaccagaatctggttaaaaccgaccccgacgccgcgcagcgacgtgggatagctcagcgaggcgaaagtcatggtgtgcgatcccggaccgatgccttgaccaaacaggaacaatgcaagcatagagatggagatagccgcctcggcactgtcagccggacggcccaccagcgccagacccaccatcgcaatcagctgcaatgcgtagcctgccagcgtcatattccacgcgcctaacttaggcaccagacgcaccgccagcagcccacccacgaacgcaaagcacagatttagccccagcgagaacaggatggtgctcatcagcgactgtttgagaaaggttgagagaatgaccggcaaaccaaaggcaacggcgttgtaagcaaacggtgaaaccagcgacgtcacggtggcaaggatcgtacgcttgagataaatgcctttcagcagctcgccgtagttactccaggccgctttgcgcacttccggctgcggttgcagattggcgtctgccgccacttctacgttgatattataagaacgacgcaaaattgccgctgcgccttcaaggtcgccctgattggcggtccagaccggcgattcattcatgtaacgatggcggatagcaatgataagcagtgcaggcaccgcgccaaagcccaggatcagacgccacaggatgtcggtcttgtcagcgggaagcaccgcatacagcaacagaaccagcaggtaggaaatgctgatagccgcataccaggtcgggcaccacatcgcgacccgcgaagctttgttgccgcggcccgagagctttgaaaactcggccagaaacgccatcgctaccggtaaatcgatgccgacgccaatgcccatcacgaagcgagaaccgcccagaacccactcgttaggggcgaatgcacaggccagtgcggcaacgacgaagaagaacatatcggccatgaagacgcggtagcgaccaattttgtcggtgaggtaacccccaaacaaggcacctacgattgcgccgagcgtaattgccgaagccaccagacccgcgcccgacggcgacaggccaaactggcgagtaatgtctttcataccgaaggccagcccaccgagatcgtaagcgtcgaggaaaacgcctcccagtgcgatggcgacgacgatacgggcatcgctaagtttggttgcgccctgattcaccaggcgtgtgatatcggccgcggaacggatcaacgtcggcgcatcgtcgacgttggatgtgtgggtataccctgatgaggcggcggtagaagccgcaatagtgtcagacatttttttaactacgcttttaataaaaaaagcagtatagacgtccagacagctacgcaacaagatcaaaatgagtataagttaaaataaaaagatctaattattgtcgattaaagcatctggtgagcgcttttttattctattcccagactaacaccgctttgacggcgctgccgttgttcgcctctttaagcgcgcggtttatgtcatcaaaatcgtagaaagtaatcatctgctcgagtgggaagcgcccctgctgccagtattcgatcagttttggcagaaaatcttgcgccaccgagtcaccttgaatcacgctaatcgccttacgcccacgagtcagcggctcaccggctataccggccaggcgaaccagcgttcccccttccttcaggacgtcttgacccagctcgtcgagatgagatattcctgttgtatcaataacataatcaagatgcgggcacagcgtcgcaaggtagttttcttcgtcggaattaatgctctccgtcgccccaagcttacgggccagcaccagcctgcgcggttcacggtcaacggcgataatcgttttggccccggcaattttagcggccatgatggcggcaagtcctacggcaccggtacccatgaccatcaggctttcgcctggcttaacctttagcgtattaaacacggttcccgcaccggtctggataccgcaacccagcggggccagcacgttaagcggcagctcgggcgcaactttcaccagattctgttcggtgaccaggcaatagtcggcaaacgccgactgaccaaaaaagtggccctgcacgccctctggataagcactggttccgtcaattcgctgaaagccaaagttaagctttgagaagtgttcacagttatacggatgacggtcctgacattccgcacacacaccgcacgactggtaggagagtaaaacgtgatcgcccggtttgaccgatttaaccgcgctgccgacctgctcgacgacgccagcgccttcgtggcccaaaatcgcgccttcggtcataaagccgagatcggtgtggcaaatgccgcaggcgacaatcctcaccccgacctcgttctcaagtggagccgcaagctggatctgatgaaaatccatgtgatggtgactgttaacgacagcggcgttaactgctctgggttgggtaacattgctcatatctgcctctttcctcaatgaaagaccgcttttcggcggtgtcacgattaattcggattaatcagcgaagttttagtaaagctatgcactaaaagtcagtttactgcaccttgagcaactgcttttatgtgtggccattttatgcacaagcaaaaattgaactatccttgtaacaccctcattttatgtacagatttctgttaattaactttgatccaggtcggccttctgcccgataagaggaaaatgcatggcgcgcacaacaggaaatgctcgattgagaagtatagctgccgcagcggcactgacagtggtcactatcttcagtctttctgctcaggcggcagacagcgtcaaggtgggatctaaaatcgataccgaaggatcactactgggaaatatcattattcaggtacttgacgccaacggcatcaagaccaccaataaactgcagcttggcaataccaaagtcttacgtggggccatcaccgcaggcgaaatcgatatctatcctgaatacaccggtaacggcgcatttttcttctctgacgagaaagacccgcgtggaaaaatgcaaagcaaggctacgagaaggtgaaaaagctcgactatgaccagaataaaatcgtctggcttgacccgtctccggcgaacaatacctggactatcgcggtacgtgatgacgttgccagagccaatcatctgcaaacgctggccgatttaggcaagtgggtcaacggcggtggtgatttcaagctcgcggcctcggcggagtttatcgagcgtcccgatgcgctgcctgctttcgaaaatgcctacggctttaagcttaaccagaaccagctgctgtcgctggccggggcgatacggcggtgaccattaaagcggccgccgagaaaacttcaggcgttaatgcggcgatggcctacggcaccgacggaccggtcgcggcactgggctgcaaaccttacaggatccgaaaggcgtgcagcccatttatgccccgacgccgatcgttcgtgaagcggtgctgaaagcgtatccgcaaattcccggcctgctgaagcctgtcttcgcttcgctggacggtccgacgttgcaaaagctcaacgcgcagattgcggtcggcggggcggatgcgaagaaggtcgcggctaaatatctacagcagaaaggcttcatcaagaagtcatcctgacaataggttaagggggcagggagagttttttttgactaacgttgtgttggctcaccgcataataaagaaccgcgtgctttttacgctgctggtgctgataatcgccgccggtgccggtctggcgtttatcacccacgcgcccaatcgtttgatctcgggacagggcattgccctgtcttcgctgctcaacgggcccgttgtgctgctgctattgccggttatccttttatttttgctttcttttgttaccccgtcgcgaggcgtttattggctggtcatgctgctggccgaactgctgctagcgctgctggtggcgctggccgggcacgcggctttatcgctgactggaggggatgaagacagcctggcacgcatctcttttggcgggggattctgggcctgcgccgcgctgtcgctgctgacggcctccgacgccatcagccgtttgaccgccaatcacagctggcgggtgttgcttaacctccagcttgctgtgcccatcgtggtgctgctctcgagcgggcagctgtcgcagctttccctgctcaaagagtatgagaatcgttcggacgtgttcaatgacgcactctggcagcacctcggactgctggtcggcacgctaatacccgcgattctgattggcctgccgctcggtatgctgtgctgccgtttgccgcgctggcagccgtcggtgctctccatactcaatattatccagacgcttccgtcgatcgcactgtttggcctccttctcgccccgctggcggggcttgccaaggccgttccctggctcggcgcacacggcataagcggcatcggtgcggcaccggcaattatcgcactggtgctgtattcgctgttgcctctggtgcgaagcgtgatagcgggaatgaactccgtcgcgcccggcgtgatagagtcggccaccggcatgggcctcagccgttttcaggtcttttataaggtgcagactcctatcgcgctgccggttattttgtccggtatccgcatcgtcgcggtacagaccgtgggcatggcgatggtcgccgcactgatcggtgccggtggctagggccatcatgttccagggactgctcagcagcgcactggatctggtgctgcttggcgtgatcccggcggtgttgatggcggccgtggttgacggaatttttaaatttttagtctcaattctggagacctcgcgcaaatgatcaatttctcacaggtaagcaaattctttgccggtaaggcggtagtgcgcgatctcaatctgcacatcgctaaggggagtttaccgtgctgatcgggacttccggttcgggaaaatcaaccacgcttaaaatgatcaatcggttggttgagcacgacagcgggcaaattacctttgccgatgagcctatcgagaagcttcgcgcgcaggatttacgccgtagaatgggttacgccatccagtctatcgggctgtttccacattggacggtggaacagaatattgccaccgtgccgcagttgcttaagtggccaaagaccaaaattcgcgaccgcgtgaccgaactgatggagctgttgagccttaaccctgaacagtttcgtcatcgctatccgcaccagctttccggcggccagcagcagcgggtgggggttgcgcgagcgctggccgccgaccctgaggtgttgctgatggatgaacccttcggtgcactggatccggttacgcgtgcgacgctgcagaaagagattgcgcgcattcatcagctttccgggcgcactatcgtcctggtgacgcacgatatcgatgaagcgttaggtctggcggaccgcattgtgttgctcagcgatgggcaaatcgtgcagcagggcacgccgctggagctgctgacgcagccagcgacgccgtttgtgcgtgacttcttcgggcgcagcgagcttggaataaaactgctgtcgttagcgtccgtcggcgagagaacgcgccggggagaaactgccgagggcgaaccggtattagcgtctatatcgctacgtgaggcgctgtcgattttcgtggcccgtcacaccgaacgtctgccggtgattgatgacaatcagcggttaatcggggtacttcacttcgccgatctggtggcagagcgggaggcgttatgagcaacctgacgggcaatcgctggctgcgagcactgcgcgatccgctgacttgggttatcgcggtgttccttgcgcttatctttgggatgcgttctttaggcggagtctttcattggctgtttcctgacctcgacaggccggtttatctgcaagacagcttcagcagcctggtgctggcacatctggtgctggtcggcgtttcgagcgcgattgcggtcgtcatcggtgtgctggcggggatgggagtcacgcgccaggccggcaaggagttcagggcgttggttgaaacactggtcgcgatggggcagacctttcccccggtggcggtgttagccgtcgccgtgccggtgatgggattcagtgagaaaccggccatcatcgcgctggtgctttacgggctgctgccgattttacagggcaccattaccggccttgaatcggtacccgcctcggcgcgcgaaattgccgaaggggtcggcatgagccgattacaggtactgacccaggtcgagctgccgctggcggcgccggtcattctggcaggcatccgcacctcggtgattattaatattggcacggcggccatcgcctctagcgtggggacacagagcctcggttcgccgattattatcgggctgagcggattcaatacggcctatgtattgcaggggccatcgtggtggcgctgctggccattattgttgatatgatatttgagcgctggagtcgtcgtctacaaaattggcagccttcagcgcgagagtagcttactgagacgataataatactatggatgatctattaaacaaatcgtgatagaaaatccgcaggctgtttaacgatgtagcttgaggaaagaatattgcttttataattctttaggaagttattatttaaatcatttttcaaatagtggagggttttttctttttcctctgacgtgatttcatacctcgctaatgaacgttcgattaaacgtaaatcattattgatttcgcctatttcttcctctaacgtttttattttatccaatgaatggctggccaggtttggatagatgatttttatcttatcagtattgtttcgactcattttcctctcgatggcgagcaccagtgaaggcgaacgtagtggagaactgtccactttaatgggctcgctctgctggcgtagtcgaggggcacctcttttacctctcaataaatcggataatgcatcagagtactcaagtaagtttttttttaaactatgagttaattctacctggacgggattattactgcttttaacggtattgtccttataaggggtaaaggaaatctctctatttttagcgctttttaagtattcagtcattgcccgtggcgtagagggtctgttatttccgttaaaagtattttcaggttggctattctgtaggggagctctgggagccataaaggggggcggattgacagcatggcacatggtgtattccttaatattattgagggagggtcaggcggcagtatagagaaaatagcagcgacaaaaaaatacagtttcaatatggaattaacgtgaataattcagcaggcacgtggaataagcgaaatccagtttatgcctgctcaggcgcattgtgccagtggcggggcttcaggaagccgtggaggcaggcgctggtgcggtaacaggggtgggcgcgccgcctggcagtttcacgggctcttcaataacgatggcatagcctgccaccattacaccgccgatagcgccgatagccatcaggccgaacaaggcgataaacagttttttacctagagtattcatttttgccggactttttccaaaaaacaggcgctcagtataaaacttttaagccgcatgacacagtcattatttgtgcgaaaaatactttctggatacattccataaacttcaagaaactttctcgttaccttttcgctaaatagcacggcggaacttgctagccatccctgagatagcgttaactgagtgcctcttgtcttcgctataagcaaaaattatgtcacgttccactttgcgtacgctgttgccgttaatgagtgccttgtttgcgctgtattttatctggggttcaacctatctggtgatccgcgtgggcgttgaaagctggccgccgctaatgatggcagggatccgtttcttcgtggcgggcgttatcctgttcacctttttgctgctgcgcggtcacaatgtgccgtcgatgacgcagtggctggctgcgggggtaataggtatcctactgcttgccgtggggaacggtttagtgaccgtcgccgagcatcttgaggtgccctccggcattgccgccgtgatggtggccaccgtgccgctgtttacgttgtgcttcagccgactgtttggcatgccgaacagtcggcttgaatggaccggcgtcgctatggggctttgcggcattgttttgcttaatactggcagcaatctcagcggcaatccctggggagcgctgttgattttgctggcctctttgagctgggcctttgggtcggtgctgagtgcccgcgtgcagctgccgaaagggctgatggccggtgcagccgagatgattattgccggtgtcgtactgctggtggtgagtcgtttgagcggtgagaagctaacgcatgttccttccgccagcgcatttgcggcgctggcgtatctggtggttttgggctcgatgattgctatcagcgcctatatgttcttgctaaaaacggtcagaccggccatcgcaaccagctatgcctacgtgaatcctatcgtcgccgttctgctaggcatcggcttcgcgggggagtcgctgtcgcgggtcgaatggctggcgctcgggtcatcctgagtgcggtgctgctggtgacgctggggcgcttcgtattcaaaccgaagcctgccccgcttgataaggttaaggtctagcgtctgaaacgccctcgctcgctgcggcgagagagggcgctgtcattactgtttttcgaagaacagcgtgactctggcaacctggacaccgaatttagtcagcgatgtcacgttcatcagatgccgatcgtcttgttgaaacagccagtcatcgaaggtcagacggtaggttttgccgctggctttgatatccatcacgtagttccagttaaaggcgttgccctgcgtatggccggtcgctacgccgataatatcccccgccgtgccgcgatagctgccgtcaggctgacgctgaatgtgccatacccgcgtctgtttctcaccgtcgttgtaggtgaaatcttcgtgcaaggtcagcgtatcgcccaccacgtcaccgcgaatgatcaccgagaagcgccgcgtctgcttgttgctgtaatcctgaatcataccccaggcatgactgttgccctgaaagtagctgtaaatatccagctgcggctgtgtgcccttgtagtcatctattttcgcgctgcatcctgcgagcagcaaggcgacggccagcgtcatgaaacggataaaaccctgaatattgagcatggtaactcctgtattagcgggccccgatcaggcctttacgcagttgagggtattgagtggacggagaaagccagatagccagaaacgcatcgcgaaacgaagcgtcaaaacgtggaccaatgggcacaggcgcaccgtttttattgttgcttgcgagatagtagaactgcccgccttgcttatcggcgagaaaggttatctggctgcccgcgctgacgtctggccaaatcgcctgtactttttgcagccattgatgctggttggcttcatcgagcaagccgagtgccttccattgatctgaggttgcctcggtcagatcctgactgctgatgtcgcgcagatagtcaatgatcaacgcctgaggccacacaccgggctgatatttccccgaaggggtgcgcagctgggagttgtagacatcgagaaaagcccaggtcagtttggccgaaccggtttgtggccatgcggaccaagcggccgcctgcgaggtcgagctgaggcagaggctgccgagcagcagtaatagcgtcaaaaaacgcgttctcacgataagctccttaaggtccgatgtttacgcagcaccggcaggctaacaatcggtagaaagcacgcccagccaagtgccagggtagaaaagacctgccacggcgaggcctcaagctgcatagcatccaggcgcatgccgagataataggccagcggaccgctgactgccccgagtaacatcagccacggccagcgcagggagagatgactgcaaaaccatagccaccaggcgctgaagcttagccacagggccatcatccacagcggtacgcccgcgccgtcactgaatgaaaacaggctcagtgcccccagataccgtccatcgcaatacccagcgcacaggcaaagagcacccattttctgcgctctggaggcgtgaaaaacagcatcagcagcgcgcccaccaccagcaatagctccacgctttcgcgtccccacactgccagcgtccaccagaggtcgaagcccagtgtcaggagccaaaagcgcagcgtgttcatgcctgtcgctcggcaaccagctggacggtactgatagtgcgcgccctgaacccggcctcgcagtagcacaggtaaaatacccacaggcggcggaaacgctcgtcgttgtattgggcattctgtgtgctccagtagcgctggacgcgctcgcgccattcatacagcgtgcgcgcatagtcgttgccgatatcgaacagatcccgcaccactagcgcggtgtgccgcgtcatgctttcggtcatcgcgttaatcgagggcaagaatccaccggggaagacgtaacgctgaataaaatccacgttacggctgtagtgtttatagcgctggtcgacgatggtaatggcctgaatcgccatacgccccttaggtttcagcaactgattacagcgtttaaagaaggtcggtaaataacgtttaccgaccgcctcaatcatttcgatggaaaccagcttgtcgtactgcccgcgcagggcacgatagtcctcaaacagcacggtcacgcgctcggtcagccctgccttttcaattcgctggcaggcgaaatcatactgctcgcgcgagatggtggtggtggtcacctgacagccgtattcccgtgcggcaaactcggccatcgcgccccaaccggtgccaatctcgagcagatgatcttcagcacgcagctgcagctgttcgcacagacggcgcatcttggcctcctgtgcctgttcaagcgtcatgtgcggggtttgataccacgccgaagaataaagcatccgttcgtcgagaaagccctgatagaaatcgttgccgaggtcgtaatgcgccgagatatttttacgcgcctgactcggactgttgtttctgaagaaatgcaccacgctgttgaccggtgaggttaaccaactgaattttgattcgattttatcgaccaaccccaggttctccgccagcagttgcagtaccacggttaaattcggcgtggtccagtcgccgtcgatatagctttcaccggccgcaatgctgccgcccagcagaacccgacgatagacgcgcaggtcttgcacctcaatctggccttgcagtggcgcggtttcatcgccgaaaaacatcggctcattgcccatttcctgcagcgttaggcccgcaccgcgcagctgccttagcatcctcagtaatatcgcgcgcgatcccttgcgacgacggctgcccgcctgttgggcaagtcgcaaatcaggtgagttcatggtcaatccttatcaacgggaggatgcgaatagattggtgcacgtttcaaccaaagtttcactgcctgccaataaatagtaagtgcggtttttaccgtcatcaacggaaagcgccaaagctgcttgcggaggttttgacgggtcaacggtgcataaaccagtgacagcgtggcatcgaattcgcgttcctggcgatgagtctcgatgtgcacacgcagacgttttcccggggtgttaactgccagtgataaaccatatccatcggattaaagggtgagacgtgaaacgctttgtctattgtctgcgacccatcgggtaccaccgcgtaggtgtggcgctcgttccacggcgtgttacgcacttccgctagcatccactgcagtacattgttgttgtcgtagagatagtaaaaatttaccggattaaaataacagccgaagtagcgcagctgggtgaggagcataacgcggccctcaaccctgtcgccggtgagcgctaaaatacgccgctgggcggtgtccttaatatcaccaccgccgagatagtcgctgcgacgaaaggtcgcagccgaaaaacgctcaagccggatgccggtgtgcggcaactggtcgatttcatccaggtcgatcagcgccataaaaataccgtaatcaaaatgatgctcaatcggtttgaaccgccgatggcgcacgctgccgacgtaaagtgcgctgttcatgcgtcatccctggcgagcagctgttcaaccacttcctcggcgcttctcacgccgtcctcatgaaagccgttgtgccagtaagccccgcagtaccaggtgcggttctgaccgtttatcagcccgcgtttcttctgtgcctgatagctggcaaggttcaacaccggatgccaatactcggttttaaaaagaatctttctctcgtctatcgagctcatgggattcagcgtgacgcaaaatacctgatttgaatcaataccctgcaaaatattcatattgtaggtgacgctggctttacggccccgcacgatagcggcatgcaccgtggcggagggcgtcttccctaacgcgctgtcgacgcctttgggtaactgatagttccagcttgcccaggcgcgtcttgccttgggcagttggctgatatccgtgtgcagaaccacatcgttaggctgatagggtaacgcgccgagcacctcgcgttcgttttcggtcggcgaggcaagcagggcgagagcctgatccgcatggcaggcaaagataacctgatcgaaggtttcaccgccgcgtgaggtttcaagcgttaccgaggtatcgtcgcgtttaaccgataaaaccggggtactggtcaatagagtgacactggcgggcagcttttcctgcatgcggcgaatatattctcttgaccctcccggtaccaccagccactgcgggcgattggccacgtcgagaagcccgtggttgtcaaagaagcgcagaaacatcgtcagtggaaacttacccatatcatcgagcgacgaggaccagatggccgcgcccatcggcaacacgtaatgcagcgcaaagaaggctgaaaagccgttctgacgcaggaagtccgataaggtcgtcgtatcgttgccggtattttccagtcgtgctttacaaagccggttaaaacgcagaatttcacgcagaaacttccagaacttcggcttgagcagattgatgcgctgggcgaagagcgtgttaaaggtgtggccgttatattcaagattgctgtcagggttgtgcacggaaaaactcatctccgtgggctgtccctggatccccagttgctcaagcagcgcaataaagcgtggataggttttttggttatagacgataaagccggtatccacggcataggtgcggttgtcgagcgtaatgtctcgggtagccgtatgcccgcccaaggtcgggccggcttcaaaaactgtaatttcacacgcggtcaggcgctgcgacaacatccatgcgcagctcagccctgaaataccactgccgataatggcaaccttcatacgcgatttaccttactaactttttagccaaaagtttttgaacgcctcgcggcagcacagaaagcaagcgcaacagccaggcaaacagaggggggaaagcgatttcgcttgccccacgagccaagccttttcggatgaatgccgaggatttctcaacggttatcatcatcggcattggaaagtcgttattgtcggtcagcggcgttttcacgaaaccgggctgtaccaaagagatagcaatgccgcgcggagtcaggtcaagcgccaggctgcgggcgaaataggccagcgccgcctttgacgcgccataggcctcggcccgtggcagcggaaacagcgcggcggtcgagccgaccagcgcaatgcgggaccccgaagccatgcctggcagcagggcatcgaggcagttaaccggccccatcaggttggtggtcatcacgcgcagtactttgtccgcctcgactacgccgttgtcgagatattcacaggtccctgcgcacaggatgaccaggctcgcctgcacccatgccagcgccttacgtgtttcttcaaggtcggtcatgtcaaaggtcaacgtgcttatctgcgccgaagccgcgctcaacgcctcaagtcgttcagcattacggccacaggctatgactttccagccttcggcggcgtagtcgagcgcgagctgtttgccaatccccgagcttgcgccggtaatcaatacgcttttcatgacgacagcctggatttcaaggcttttactacgctaccgagcaccgggacgtgttcgtagagcatcgcgcccaggtcgtagtaatcgcgctggtaaatgactctgttttcgctaaagcgcaggtgactgctgccctcaagcacccgctccttacccttgttgatccgtggatgggcgtaaaacatcttccagattaagacagtttcttcgccatcggtcagggtctgctggatatcgaaacggcagtgctgggtctgcgcgagcagtttttcaaaatagtttctgagggcgtcaatgcccgcatgtcgaccgacggggtcgatcaataccgtctgctgatgatagatatcagccagtttggagagggcagcagaatccagatgccgataaaattccttcagcttttcgagcgtgttctgacgtgcacccgtttcaccggatgtggaggctgttgaggcaaatgtcattaacgtctccttcatctgataatcgcgtcaggttcttcatctggcggggtttgcagcaatacggctgcacttcccaaaagtgaaacggggagccccaactgttgccagtgcaaatagcgtgtacgctgaacgctggttaattttccttccgcccacagcaagattagcttggcctgcacgccttcgaaatgcgggtcctgaaggggatcgggcaacaggtcgatatgcaggccatcaccgctgcgggcaatagcttcaagccaaagctcggtgcgatctatttctccccatccggccaatagcaccttggttccggctttttttctcgccgcattcatgcacattacggcatgttcaatcagcacgccgtcgagcagtccacgcagatacagtgtagaggcatttgagactaatcgtgtgcgaagcggcctcagcacgttatttaccaaactttcagggggatattcccggccaaattcgataattagctgacggactttctgcgttttttcttcctgcaaaacggaaagcagcttttgttccagctgcgaccagccgctgggatgtggcgtgatactcccctcgagcagtcctttgacctgactgacgggaacgccacggttaatccaccctaaaatggtgcggatagtttccaggtcgttatcgtcgaacagtcgatgtccgccctcggtacgctgaggcttgagcaagccataacgccgctgccatgcacgcagcgtaaccggattgatgccgcaaatgcgtgcgacttcgccgatgctgtacagagacataaaagatattccgctaaattactaagccttaattaactctagccgttcatcgccaagttgtacaagtttattgttcttgtacaacttataaagtgatacaactttagaggtgagaggtcagagcagtcatgatgtttgccattataccgagtgttgtgtttcgcgacgtaacccgttgctaatttctcaaataagagatagattctcaccaaagagaatttggtgggaaataataccgatgaacgatgagcaaaaactggcgcacagactgtcgacgttgagaataaatcaaaactggtcgttggagatactggccgagaaaaccgggattagccgtgccacgctctcgcggatagagagggcggaaaccagcccgactgcctcgctgctcggcaagctaagtgcggtttacggcctgccgacttcgcgattgctgatggatctcgacgaaaatactgccgaactcattcgccacaatcagcagtcagtttggcatgacacggaaaccggttttgagcggcgttcaatttcaccgcctgcccgagattttcacgccgagtttatgtccggtcggctgcgtgcgggggcgactatccactacgatgcgccgccggttttcggacttgagcagcatatctggatgttgtctggcgtcattgaattacagctcgacgcccagcgctatcgattggaggcgggcgactgcctgcgttttcatctttacggcagctcgacgtttcacgtgcccggcccgcaagatgcctgttacacccttgttatttgtcgtccctaagcgtaaggagaagtctgtggttatcatcagtgaattgaaaaacgagccctattcgcaggatttctcgcgtgccgacctgcttgaccttgccgacacgctggtgggctgcgtcagccttggcgcgagcgtcggatttattttcccttttggtcaggccgaggcgctgacgttttggcacaagctgttacccgctttcgcggccggtgagcgtcgaattctggtggcgcgtctcaacgataagattattggcacggtgcagttggtggtcgatatgccgggcaacggtcagcatcgtgccgacgtggtgaaactgctggtccatcctgaggcgagaaggcaggggattgccagaaaactgatgcaggctgctgaaaagctggcggttaagcttgataagacgctgctggtgttggatacggtcaccgacagtgatgcccagtcactttaccattcgctgggctatgccctgtgcggtgttattccggggtatgcgttgtctactgaaggagtctttgattcgaccagtgtgatgtacaagaagatcggctcttgaagacaacctggtttttagattccattttaagggcatgtgaagcacataccctttattttaaaggatcttaattccagcgtggcaatgaaaaattatttgccatcccaggctttcagcgcatcagctctgactttcagcttctgctctggcgtcagcttgttatagcccggcgccagcccgctctcccagtcgccgtaaagcgggttaggcagcacgatgaactgagtaccgaacaggctgtgattgctgttcacgaaattgcggcgctcggcgttgcttttatggtaagtcgcggcaccaaagtcgttcaggttgtcaccgacgtacagcacgacgttataaccttcgtttttgatggcatcgaatcgcgcctgtttgttcgacgtcgtcgtgctcagacgcagcgttttagcattaacattcgggaagccaagacgctgtaagttggcaagcgtagcggcatagtctttctggtcacggttggaaacgtagaacataatgccgccgtggctgtcaacgtattgcgcaaaactgacagcacccggtaccgcgttagcctgctcggcgtgtgtccatcgggaccagctcttatcctcaaacggcttgtttgccttgacctgccaggcgctgtaggcgctgttgtcgatcatggtttcatcaaggtcaacgatcacggccttaggttttcccgtcagcgattgcgctttgtcgaaggcgtaggtggccgtagtaaaggcctgataggtcagcgcctgatattcaccagactgctggaaccagttcagcgccatcaccgattggtcgttaagttgtgcagcggcatccgatttgctttgctgagcacagccggtcaaggccaggaatagcagtgcgccggtgccgtaaagagaagctttcttcatcattatctgtatcgtcctgtgatggtgtgattagaaaagttattattcccagacaagggcctaaaactttagcagattcagcgggctggggaagggcgaagggcgagaaatttgcgctggataagcttttcgtatgacgaaaaaagccgggggatgagcccggcaaaatatccaatgaaattaaaatgaagcgaggtgttattattagaattggtaggtcagaccgacagcaaccacattatcagtattcaatgccaacttattatcggtactcaaacggttgattttataatctacgaaggttgacatattcttgttgaaataataggtcgcgccgagatcgatatatttaatcaggtccgcatcacctacgccttcaatatctttcgccttggtttgcacatatccaagagaaggacgcagaccccagtcaaattgatattgagccacggcttcgaacgtttgtgttttatccgcataaccgctgacggctgaacttgtctggctggaaacgcccgcaggaacagataccgcaatcatacgttgagtttcggcataaatagcggctaaataaacaccgttattatcatatttcagaccggcgttccaggcggtggctttatcgcctttgcccagcgtcgttgcggcctgggtattggtgcggtcagaggacgtgtaggccgcacctgcgctgatacctgcaccgatgtcataggttgcggaagcggcatagccgtcaccgtttgaagccgttgcggaacgggtgctgctgtcgtcgtttttaccctggtattgcagggcgagattcagaccgtcgaccaagccaaagaaaccgcggttgcgataggtcgccatgccgttgccacggcctgtcataaagcggtcagccttggtatagccgtcgccgccgaactctgggaacatatcggtccagcccgcgacgtcgtacagtacgccgtagttacggccgtagtcaaaggagccgtactgggcgaatttcagaccggcaaagccgagacgagttttagaaccggttgagccctgtgcttcagagacgttatcggcaacctgatattcccactggccgtagccggtaatcatatcattaattttagtctgacctttaaagccaaaacgtacataactctggtcaccatcactgccgcttgcatcagagaaatagtgttcggctttaacttttccgtaaaagtctagtttatttccgtctttattataaatttctgctgcgtgtgcgcctgaggcaattaataatgatgggattaatattgccagaagattacgtttcattgttaaccctgtatttgtttttaaacgtcgtgtcaaacgtttttaattaaaagacgctattcatcatgtgtgctgttatttccatctatgagcggaaatttctacagcgagagttttttaccctatatttgtgatcgatttatgacatcgggaaatgaactttcttttttttaagtgaatgattttaataagctagctaataatagtgatgtctattaagttggcggctattcaatttgcggctgacgtgagcgggcgagtgtgggacaataacgcaaattttgaaaatgataagagatgcatggcgctgtcctccgcagtaaaagatcagattagccagtggtacaaagccctacagcagcaaattccggattttatctcccgcgcccctcaacgtcagatgattgctgaggttgcgaaggcctttaccagtgattcagctcgacacctcgcgattgaggcgcccaccggggtaggtaagacgctgtcgtatcttattcctgggattgccgtcagtcgggccgaagaaaagcctttggtgataagcaccgccaacgttgcgctacaggaccagatcttcagtaaagatctgccactgcttaagagaatcataccagacctcaaatttaccggggcgtttggccgtgggcgctatgtctgtccgcgcaatctgtcgatgatgagcactgaaaatgcgcagggcgatcttggattgtttctcggtgacgagcttgctccttccagtacggaagagcagcagttttgcagcacgctcgagaaagcgttggcgcgctacgagtgggacggactgcgtgaccactacaaaaaaaccattcaggacccgctgtggctgaaaataagcaccgataaggccaactgtctcggccgcaactgccactattatcgcgagtgcccctattttgtggcgcgcaaggaaatcgaaagtgcggacgtggttatcaccaaccatgcgctggtgatggccgctctcgagtcggagtccgtgttgcctaacgccaaagatttgctgctggtgctcgatgaaggccaccatctgccagaggttgcacgcgacgcgcttgaagtggacgccgaaatcaccgcggtatggaaccatctgcagctggataacttcgtgcgccagattgagcagtgcatcgcgctgtttaccccaaagaatccgccgccgctggccaacgctgagcgtttacacaatcactgtgccgaaatgcgcgagctgctgctgttgattgagcagcaggttaatctctatctccccgccgccgagcctgaaggcgaatatcgcttcgagatgggcgcgctgccgcccgaactttccgaactctgcgcccggcagttcaagctgactgatgcactgcgcggtttagccgagtttatgctcaacgatctgagcgaaaaaaccggcaagcacgacgtgctgcgcctgcatcgctctattttacagatgagcagaatgctcggttatctcgagaccatgaccaagctctggcggctcgcggccctcgacaaagcttccaatgcgcccattggtaaatgggtgacgcgcgagtatttcgataaccagagccatctgttgttccactgcgcgggaattcgcgtcagcgagcagttagagaaactgctttggcgcaaggtgccgcacgtggtcataacctccgcgacgctgcggtccctcaacagttttgcgcgtatccaggaaatgagcggtctcaacgagaaagccggcgatgtgtttattagcctcgactcgccgttcaatcacgtcgagcaggggaaaattgtcattccgcagatgcgccacgagccgttaatggccaacgaagcgcagcatattcaggagatgagcgactttttccgcgccgagctggccaccgaaaaacacaaaggtattttggtgctgtttgccagcaatcgcgcactgcagcagtttgtcgaactgatgcctgacctgcgcctgctgctgttagttcagggtgaccaaccgcgctatcgtctggtcgaggaacatcgtcagcgcgtcgaagccggaaaggttagcgtgctggtggggctacagtccttcgccgaagggctggatctcaaaggcgacctgctgactcaggtgcacattcacaagatagcctttccgcctatcgacagcccggttatcctcaccgagggtgaatggcttaaaacgctcaagcgctacccgttcgaagtacagagtttgccgagtgcgtcgttcaacctgatccagcaggtgggacgattgatccgcagccacgaatgccggggtgaaattgtcatctacgatcgtcggctgatcactaaaaactatggcgccaggctgctcgccgcgctaccggtcttccctatcgagcaccgtgaaatgccggctcccggctttaataaatacgttccactgacccaaaccaaggtcgttaaagcgcggagaaaacgctgagcctcagcgggcagggacaccaaggtttctccccgtcattggctgggttatgctggtgtaattcgcaggtgagggaaccaagatggattacacaaaaattattaaagaagtcggacgcgggaagaaccatgcccgtgacctcgaccaggagcaggcgctggcgctctaccgtttgatgttggcgggtaaggtacccgacttgcagctcgggggctgctgattgcttttcgtatcaagggtgaagccgagcaggaaatgctgggcttttatcaggcgatggaagagcagaccatcaaactgcgcgctcccgccgacggcccgatgccggtggtcattcccagctacaacggcgcgcgtaaacaggccaacctgacgccgctgctggcaattttattgcatcgcctgggcctgccggtcgtggttcatggcgtcacagcagacccaagccgcgtgaccagttatgaaatcttccaggcgttgaacatccccgctgccggctccgcagagcaagcgcagtcgatgctggatgcaggcgtcggcccggtgtttatccccgtatccgtgctctgtcccgccattgataaacagcttaatctgcgctgggagatgggcgtgcgcaacagcagccatacgctggccaaactcgcgacgccgtttttcgagcagcctgcgctgcgtctcgccagcgtctcacatcctgaatatatccagcgcgtctcatcattcttccacgatgtttccggccttgccttgctgtcgcaggggacggaaggcgaggtatacgccaatccacagcgcagcccgcaggttcacctgattggggccggagagcagcagctcctgctcgaccgccaggagtttagcggcctgacgctgcctgcatcgaaagacgcacagacaaccgctgactggataaccgactgtttgctggctaaggttccggtccctcaggcgattttaaatcaactcgcctgctgtctggtcggcaccggactggccgaggatatgtccgaagctcaaactcggattgagcggcttttttagggcaagcctggtcgacagactgcggctctgaatttacactcaaaagataatctcttttattttcagccaagaaggatgcttatgaaacagtcacaggattattttgcggcgctgaatcacgactatctcaaggtccataaaaccaaggaagcgttgttctggcagcattatatgggcacaggagacgacgacgtcgccgagcgtttctcggctgcagaaagtgcctttaaacgctttatcgccaacccggccaggctggcggagctgcgtgagcagattgctgccgttgaggctgaacccgagagcgcggcgcgtgaatcgctgctgaccggcctgcgcggctggtaccgctttttcgactgcaatgctatcgaagatccgcaggcgcaggaaatccttgatgaaatcattcaggccgaatccgcgctgtacggtaaacgcaagcagcatcgcctgatgcacctcaatagcaagggcgagcaagtgacggcgtcgctcggcgagctgttgaccaatcaggccactaacgaaaacgaagagtatcgccgcagttcccaggttgcgctccgagagctggaacaatggctgctgcataacggtttccccgagcttattgcgctgcgcaaccgctttgcccgccagctgggctaccgtaactacttcgattacaaagttaacaaaaccgagcagatgagcccggagcagctgttcgctatcctggacaggttcgaggagcaaacccgcgacgccaacgtgcgcagcctcaacgagctcgtggcacgcgaaggcgatgccgcgctgatgccgtggaatatccgttacgccagcgcaggtgacgtgacgcgtcagctggatccctacttcccgtttgccgactcgctgagccgttgggtcaacagcttcaagcgcctgaatatcggtttcaacggtgcaacgatgcagctggacctgttggtgcgcgaaggcaaatatgagaacggctttatgcatgcccctgtgcctgcgtttgtcgataacggcaaatgggtgcccgcgcagataaactttaccagcctggcaaaaccggatcaggtcggcagcggtgcgagcgggttgaatacgctgtttcatgagggcggccacgcggcgcacttcgccaatattcgccagaatgcgccgagcttctcgcaggagttcccgccgacgtcgatggcctatgccgaaacgcagtcgatgttctgcgacagcctgctcgacgatgccgactggcttaaacgctatgcgaaaaatgcgcaaggcgaaccggtgcctgatgccttaatcgagcagaatattgccgcacgccagccgatgcgtgcgttcaacgatcgtcatatcctgctgatgccgtattttgagtggcagctttatcagtggccggaagagaagtgcacgccggaggcgattaccgcgctggctcgcgacgtcgaaacgctcatcctcggcgtggcgggtagcccaaggccaaccctggcggtgccacacctgctgtcgcttgagtcggcgtgttcttatcagggatacctgctggcgctgatggcggtggagcagacgcgggcattcttcctcaaacgtgacggctatctgaccgataattcggccattggccccgacctggcgaaacattattggacgccgggcaacagcgtcagtcatgacgagaccttacgtagcctgacgggagagggatttaatccggattatctggcgcaggcctgcaaccagacggtggcggcagcgtgggaagaggcgcagcaggttattgccgacgctgcgagccgagaacagccccctgccgactttgatctcaacgttcatatcaaggtggttgacggcaagcgcgtgctagcggataacgccgagggtgatgaggcgatgtgtcaggacttcgccgactttgtcgagcagacttacttcaggaaatagcggtgagaagcgtgggggacggatatccccacgcgcttatcgtgcgtcaggcctcgtgaggtcgaaacgcaggtcttctgaaattccataataggccgagggccctccggcgcgcagcaccggctcggcgagtgccgtctgatatatcccgtctttattcagcaaatggcgggcaatatgtactgccaccacttccccatcactaaccaggtatcaatcttctcaccggccgcgctttgcagttgaatgcactgcgacagtttgcactcgaagttgaccggactttcggcaacgcgatcggcggcaaccagcgtgcccggcgttggcgtcagcccggcaaactcgaactcatcgcggccatgggccagcgaggccgagctttcattcattttcaccgccaggctgcgggtcgtcaggttccagacgaattctccggtttcgacgatattcgccacgctgtctttccatccactgctggcgaaaccaatgatcggtggacgataattaaagcagttgaagaagctgtagggggcgagattgcgctggccctgcgcgttgcgcgaggctatccagccaatcgggcggggcctacgatggcgttcagcggatcgtgcggcaggccgtgcccttttgcgggctcgtaaaaatagcgatcgtcggagctcatagttcacctttttggtcatttagcgttgcccactggcgtaatgtgcgtcagtcattaggcagtttctcaatagcttagccaaggcggcgtcgaattacagtggcctggtgtgtcatgctgacagtcatggcgggccgtttgtgttatcttacgcggcagaattttccccgaggtgtgtaacgtgacgactacgctcacacattgggtaagcttaacattgatattggagagtcattcaggtggaaagaaagaaagcgattccgcaggataaaaagatagttttcccgcaggagaaaagcgggcttcatgcgcgaaatcgccaccgtagccgctatgattttcctgcactgattgccagcagcccagagcttggggcatttgttgccgaaaacaaatggggcgatctgtctattgatttcgccgatcctcaggctgtaaaagcgctgaatcgcgctctgctgcgtcatttttatcagattgaaaactgggatattccggcagactacctctgcccaccgatccctggccgcgccgactacgttcaccacttggcggacgttctagccgacagcaacggtggggttatcccgcagggtaaaaacgtggcgattctggatatcggcgttggcgctaactgtatctatccgatagtcggtttgcgcgagtacggatggcgcttcaccgcaagcgagattgatgaagtctcgatggcagcagccaagaaaatagtcgcgactaacccagtgcttaccaatcaggtccgtttccgtctacaggctaagccgccgcgcatcttcgacacgattattcgtcacgacgagcgctacgatgccgtgctgtgtaatccaccgttccacgcctcagccgccgaagccgccgcaggcagccagcgtaagcgccagaaccttgggcttgaaggccgcgacaacaaggccgagctgaactttggcggtcagcacaacgaactgtggtgtgaaggggtgaagaggccttcgtggtccgcatggtagaagagagtgcgcaaaaggcgcataactgcctgtggtacacggtgcttatctcaaagaaaaccacgctgccgctgatttatgacgcgctggaagaagccggcgcgaccaacgtgcgcaccgtcgagatggcgcaagggcagaaagtcagccgttttgtcgcctggaccttcctgacgccttcccagcagaaagcctgggccggtaagcgctggaaataattaccgcgttttccgcattaaaaaaggccccttatggggcctttttttacgaaacgtgttgcaggaactcgcgcaggcgttcgcttggcgggttgctgataagctcggctggcggaccatcctctgcgatgcgtcccttgtcgatgaagatcagacgtgaggccactttctcggcaaagccgacttcgtgggtcacgataaccatggtcatgccttcttcggccaggtctttcatgacggtcaacacctcgtgacgcagctcggggtccagcgcggaggttggttcatcaaacagcatcagcttaggcttcaccgccagtgcacgagcaatagcgacgcgctgctgctggccaccggaaagctctgacggatagtggtgcgccctttcagacagaccgactttcgccaacagctctttcgccagcttttgagcctcatccttgctcgcgccacggacgcgaatcgggccaaaggccacgttctcgagcgccgtcatgtgcgggaaaaggtggaactgctggaataccatcccggcttcttgacgaatcagtcggtcatcaaccttcggatcgttgaccttcagcccgtcgacaatcaggtcgccggaggttatctcttccagcttgttgatgcagcgcagcagggttgatttgccagagcccgatggcccgataataaccacgacctcgccctgagaaattttcaggtcgatatcatgcagcacctgggttttcccaaagtgtttggagacgtttttaaattcaatcataaaattttcagtttgcgttctaagcggcgcatagcaaagctcagtgccagcgtgatgatcagatagataacggcaacagcactccagatctccattgcgcggaaattaccggcaataatttcctgaccttgacgtgtaagttccgctacgccgataacgataaacagcgaagtatctttgatactgacgatccattggttacccaacggtggcaacatgcggcgcaaagccagcggcatgatgatgtaacgcagtgttgcacgacgggaaagtcccagcgccaggcccgcttcgttgaagcctcgattgatagactgcaccgcaccacgcgtgatttccgcgatataggcaccggagttgataataatggtgaccacggccgcggtaaacggatcgattctcagaccgcttatcatcatcggcagggcaaaatagataaacatcacctggacaacgattggagtgccacgaatcagctcaatgaataccagagcgatattacggctgataacgccgccaaacgcgcgcgcgaagcccgcgatgacgccaatgataacgcccccaactaaacccaggatagaaatccacagggtcatcttggcgccttcaagaaggataggaagagcggcccaaacaacgctccagtcaaactgcatggattaatctcctgataaacaaaacaaagccgaccctggtgatattccactcagggccggtgatatagactgtgcgtgagtcacgcaggacagctatacctcgttagtgcaattatttaggttcggcatcaaaccattttttatagatagcagcgtaagtgccgttcgcgcgcagcgttttaagtgcagcgttaactttatcacgcagtgggctgcctttcgggaaggcaacgccgtagtcctgacctgcaacggctggacctacagttttaaagttaccgtgaccggcggttttgatgtagtactgaatattaggggcatcgaacagtaccgcgtcagcacgacctgtacccagctccatgtaggcgctgtcgatgttcgggaactggcgaacgtctttaggtttcaggtttgaagccaaatagttgacggagctggtgccgcttttcactgccaccactttaccgttcaagtcttgagtccctttgatatcggtattgtttgacttaaccatggtgatcaggccgctggtgtagtagccgtcagaaaaatcaactgcctgcgcgcgctgtggggtaatagtgatacccgccagagccaggtcgatgtttttggtctgcaatgcggggatgataccgtcaaagtccataggcttcagggtataagaaactttcatttcttttgccagcgctgcccacaggtcgatatcgaaaccgacgtatttgtcaccctgtttaaattcaaaaggaacaaatgcggtatcagtagccacgataagtttttcttctgctgcatgagagcttactgcaaaggccagagtcagtgcggccagggaaacttttaacatcgacttcataagtgcaatttcctttgtatatttatgggagaacatacccttttatagttacgtgggtgataagcaaaagttatgccacatttctatctttgtttaatttcaaggggttagtcgccattcattggcatgaaatgctaaaatgcctcagggtttgcaccaaattggtgccttggtttttcgcggatgtccattttggtgcgaatcactaggctaaactattttttatctcaaaactgcgcatttattaacattgttatacataaagtacgtgcttctgctaacaaaattgcttgcaaaggcggtggtatgcctttttatggagcgtggagtgtgtcttaaaacggagcaggaggcaataatgtcttttgatgcacgtttatagggcggtggtgaaaggaagggccaagtttgggcaaaaaaaaatgaggagccgaagctcctcatctgttcaaaaatcgtcgttagtgatgacgtatgacggataaataatactttccgtcgttactcgatgttggattcgataaaccacaagaatttatcgaggtcgcgagatgcggcagtaaagatatccgcagtatcttcatcttcgacctgagtaatcgccttacgggtatcgttggcaactatcgcgtaacgttctgccagggctttaagatgctcctggacggtatgaatattggttggatagcttttcagcggcgtcttgtcgttcacgacctgcacggtacccagcgcaaccccacctaactgaacaacacgttctgcgatagtatcctggtgctcagtgattgcggtacggaagccgtcgagcatttcatgcacgccgataaagtttgcgccacgcatgttccagtgcgcctgtttagtaatcagcgacaggtcgatgaactcggcaaccagtttgttcagaaccttgatggtctcgagtttggtgctttcatctacatcgttacgcgtataaagaagttctgaagatttcgtttttaccagtttagcggtactcatcattaatatcctcttcagtgagtagttatgtatttgatcacgggaataagtatagcaagctttggagatgacgttgaaaaatatttcctatcactcttatagccgtgggctaaataataaaaagcgggccatccacctcccaggaaattatacctagccctaatttcttattccgcgctgcttttaaataacctaaggcccataaacgttaatatcaacccctgaaacgtagttttctaactaacttgctgttttatttgaatttatttattttgcttgagtttgattaaatggtgggtgtgaatgtgatttattttcattggcttttgtcatgagcattttaaagaattcattaagacaattctgcattatgtcatgtttatttgagctattggtgcggtagattattcacgctgtatcggaaatttaaatcggtatattgaggaaggtgctgccttcctcaatatataagacgtgggggcaatgctaaagcgtgatgcgtccgctgtagagcaccgcacctgtgggttggccggtaggggagccgcctttaggctcaaggctgatagccagcgtcgagttgccgttggcgagattgtcgtttaatgccaactgcgtcgcggcgctgttgctcaacagccccagggattgcggtttgccgccggcagggataacccaaagttccagactgcgatcgctggcgacctccgcggcgtgcagcggcgtaatggtcaactgctgaacatgactggaggtgttactggcggtcaccacccattgtccggaatccgctgtccccgcgccgttgccaagaatagccactggcgttgcttgagacgaaagcatcgacgaggattcccaaagtttaggcagcactaagacaatcgccagacaggccgccaccgcccagccaatataggcgctgttaagcctgcttataccgggaagcctagaagaagtgctctggtgggttgtgtcagtagcaggcggtttgggcggcagctgcagctgaatgcgtttccacactgaatcgggcggcactatgggctttaactggttgtccaactgcgcaaaggcctcctgccaacgtgcgacctctgccgccagctccgggtcttgttgcatctgctgctcaaactgtaggcgagcaggcccccttagggttcctagcgcatactctgccgacagagcagcgtgatattcgcgtctgtttttcataggcccacgcagctcttcaagtgatccagggcgcgacggatccagcttttaatcgtgccaagaggttgttgcaagtggtcggaaacttcgccgtgcgagagcccctggtagtaagccaacaccagactctgtcgttgttccgcagggagatgccccagacattccgccagtttttttgcatcggtatcttgctgcaaacggatgagcggctgatcgtactcatcattgccgagagtatcctctacgccttcttccagttccagccactgattatcactcccgcgcatccagtcaatggcgcgattgcgcacgatgtgcgttaaccaggtcatgggagaactcagtgcagggttgtagcttgccgcacgattccaggcggtaatatagctgtcgtgcaagacctcttctgcccaggcgtggcgacgcagcatgcgcaacgcaaccgcaaaaaggcggggggaggttaaccggtagagttgttcaaaggcttgacggtcgccagcagcgacagactgcatcaactctctttgcaatacgctgtcggttgccggattgtccaatgcgttttctttcatcagttcttcctaaaacctcggagggagcagcacaccggcggcactgcatccctccggctgtgtccgaatacgacacagctcattataggagagggtttttatttaggcatcaatacggtatcgataacgtcaatgacaccgttgctctggttaacatcataagtgctgatgttggccacgtcgcctttggcatctttcaactggatattgtgcggaccattgctgattagccacagagcttgaccgttaacggttttaagctcggcatgaccgccgccttttttcagcagtttttcgagatctttcatctcgtatttacccgcaaccacgtggtaggtcaagatgctggtcagcgtggctttattttcaggtttgaccaggttgtctacggtaccggccggtaatttggcgaaggcagcgttagtaggcgcaaagacggtgaaaggccctttactggagagggtatcgaccagaccggctgccttcacggcggcgacaagagtggtatggtctttagagtttacggcgttctcaacaatattttttgaagggtacattgctgcaccaccgaccatggtggtgttgtctgacatcattgcagccattgacgcgctgctaaacagaattgaagcacacagagcggtacggataaatgttttcatgatgtaatcctttagggttgagggtaggacttattgcctgacataagtacatacgacccagctcgccttttggatgcagcggtgaagcaaaaagattttctttttcgacataatgtctttaattatatgattttaaaataaaatttattttattgcggatccacttttatcgcgcgaattttagcgcgcttctgtaccgtcagcgtcgagcccgccgaagcggcgatgatagccaccagcgcaagccactgcatcggattcagtatttcatcaagaaacagaatacccgagaaagcagccatcgccggttccatgctcatcagcgtaccgaaggtcttggccggaagccgcgtcagcgccatcatctctagcgaatacggcaccgccgagctcaacagcgcaatacccagacctatcggcagaatatccaggctaaacagaccactgtgcgcttgtgcaatgccaatcgggcagaagatcagtgcgccgatgcttgaccccagcgccgccgtgcccggcccatagctgctgccagcgtgctggccagcgaggatgtaaaccgcccagcaagcgcctgctatcaatgcaaagccggcaccgacgggatcgatgccagtcacgctatggcctattggcaggaggaaccctaatccaatcaccgccagcagcacccaaacaaagtcgatagggcggcgagaggaaaacatcgcaaccgccagcggaccggtaaattctagtgccacggcaatgcctaagggaaccgtgcgaattgccaaatagaaggtataattcatacaacccagcgccagaccgtatatcagcaacgagcgcagattgccgccgcgcatttttattcgccacggtctgaaatagcacagcaggattatcgaccccatgccaagacgcagtgcggtcacgccctgtgagccgacgagggggaataatgacttcgccattgcagcaccgccctgcagagaaagcatggcaatcaatatcattgcaacggcaatcagcggattgtgtgctttagccgctgcgggtgaaacggtatcggttaaaagttgccccgactgatttttaagagaattatttttcaaaggtaacgggtccgtacagagtaaaaggcggatagagcgccgctgaaaagccgatattgtactggcaaccagaaatttttagtggattagtgttagcagaaggtaaaaaaacttttgtctcaaggggatgaatgagacaattgcacaacaaaaccgctgattatttgcgcaaaacattaggaatattccgctaatttgaaaaagttcaataagtttatcttatattattacggtgaaaaaactcttttaaattagctggatacgtcgatttggaaactttttgttacaccataaagtgcattggacatcttaattgaggcagagtttcacactactttttgttatattttcatggtgaaggttattttggttcccttttttgaggtggttatgaaaaaaattgcatgtctttccgcattagcttgcgtagtagctttaggtacttcaagtgcattcgctgataccagcactgttacagctggttatgctcagagcgatatgcagggcgtggctaataaagcaaacggcttcaacctgaaataccgttacgagcaagacaacaacccactgggtgtgatcggctctttcacctacactgaaaaagatcactctctgactgataattcttatcagaaaggtcagtactacggcatcaccgcaggtccagcttaccgtctgaatgactgggctagcatctacggcgtagtaggtatcggcttcggtaaattcagcaataccgaaaacccagactctaccgttctgcgtcagaagtctgacaccagcgacgttggtttctcctacggtgcaggtctccagttcaacccaatccagaacgtcgctcttgacgtttcttacgagcagagccgtatccgcagtgttgacgttggcacctggatcgcaggcgtgggttacagcttctaattatagaaacctggctgcctcggtctttaaagattcaggcaacgatgtttcgaaaaaaaaccgcctctcggggcggtttttctttttttattttccgtctgttagtcctgcattttgcttaaatcccgctgtaccagttatacccctggtcttcccaatatccgcctgggtaggtgtcggtcacaaaaattgccccgatatgtttggcatttttgaagccaagcttggtcggcatacgcagacgaagcggataaccaaagtcgggcggcaaaggttttccgccgaagtcgagcgccagaatggtctgcggatgcagcgcggttgccatgtcgatgctggagtaatagcggtcatcgcatttaaaaccgacatatttgcaggtcaggtccgcgccgacatgctgcaagaaggtcttcagcggcacgccgctccactggcctatagcgctccatccttcgatgcaaatcagtcgggttatctggctgctttgcggtaattgctgcagctgttgcaacgtccagggcgcttttttctccactttcccagagacttcaaggcgatagttggggatatctatctcgggcacgttgtactcgggataataagcgttaaagcgaaagggtttggtaatctggtccgccgagtaagtttgcgctaacttctgaccgctgaagagccagctctggacgcggtcgttccagcgtgacatcgcccacagcaccttatcgacgtcatctccgtcctgcatattgcagcctgttagcatcgacactgcgccaagcgtcaggccagacttaatcatcaggcggcgttgaacgttaaccagctgcttgcgctggtccggctcaagaattaactttggccgtttcttttcatcagtcatccgcgctttctcctgcatttttggtcgcagcgttgccgccggtaatcatgcccggcaaggttttcggcaccagcagcaccattaccacgtgtacaacaacgaacagcataatgccgctcatcgcaaagaaatggacgtagcgagcgacggtgaatccgcccatcaaatacaccagtccgctaaactgcaccggtttccagatggacaatcccgaaatcactaacagcaggccgagcaacagcacgccgacgtacatcagcttttgcaccgcattatattgattagacttatgggataaccgaaaacgcagtgcgcttaccaggtcatgccagactgaggccggcgtgaaagggaaaaaacgctgcctgaaatggccgctgaacaaaccccagagcaggtagaaaagcccgtttgccgccagtacccacatcactgccagatgccagccgatattgccgccgagccatccgccgagcgtggcgttttgtggaaaggtaaaattaaaaatggggtcagcgttatagataccccagccgctcatgaccatgccaatcatcaccagcagattgacccagtggcagagcctcaccggccagggatggattctttttttacgcataagattttccttggagggaggtcagcgccagtccgccttgaagcgcagacacgtgagggggcgaaccggcgctggtattcaattcacattacatcggtggggtaacgccgtctttgccggcagcaattccgcgagcggccagggcaccttgagcatctttaattgggaacagcacgatgtgagcacctggtttcagcaggctgcggtcacccggtgccagcagaacgaccggtacgtcatccggtactactacggttttttcgccgttctggtatttcacggtcagtgtacggccattggagttgaccagtttgccgacggtgccgttggtcatggtattgattttaccgtctgcggactcgaacgggttgaagccttcaccgctgccgcgcaggcttggggcgaatacgtgaacttcgagcgccttcagcgtaccgttaggctgaggtacggcggcagtgccgatgaaactgtcagccttgatgtccgacattttaccttcggtaacctgggtaattttggtctgatcggtcagcttgacatccagcttttcgccctgacgggttgtgagctcgagggaggtaggggtcacagaatcgatggtgccacgggtcggtttaatggtgttgctagcgtctgctgcaaaagccccgctggtcatcagtagggaagacagcagcagaccggcaaggcgtgaggatttaatcataatactctccaaattattcatatgagaactacaagggaagtcaggtgacgcatcaatataaaaatcagcctaatgtttgctaattaataatagacaggatggacgacatacagggactcattgatgacaagttgatgacaataatgtcatcaaaggtttcttccagaactgatagactttacaaaggaatgcggagtcaaagaggcacacatgcggatactggttattgaagatgacgtcagcaccggcgactaccttaagaaagggctgggagaggcgggctatcgcgttgatttggcgcgtaacggcgcagatgggctatttttggcgctggaagacaactttgatgcggtgatcctcgacgtcatgctgccggggctcaacggctggcaggtgatggaagtgctgcgcaagaagagcgacgtgcctgttttgttcctcacggcacgcgatgaagtgcaggaccgtattcacgggcttgagctaggcgctgatgattatcttatcaagcctttctccttcaccgaactggtcttgcgcgtgagaacgctgctgcgtcgaggcacggtgcgtgagtctgacacctattcgctggccgacctgcacattgatgtgctgcgccgtaaggtgacgcggcaggacacggttattcccttaaccaataaagagttcatgctattgcatctgctgatgcgccgtgaggggaggtgctgtcgcgcaccatgatagcctcgcaggtctgggacatgaattttgacagcgataccaacgtggtcgacgtggcggtcaaacgcctgcgcagtaaaatcgaccggccctatgatgtgaagcttatccataccgtgcgcggtatcggctacgtgtgtgaagtgcgagactatgagtaaacctttttcacttatcctgcgttcgacgctgctctttgccctgattgccgccctggtggtcagctgcgtgggcttttatctctattactcgatggagaaagagatgatccgccgagcagattatcaggtcgcgggcagggtgcagtatttccgccagctgctgggcaatgattttccgttgacgcagctcagccacaatcccggattatttgagaatatgctcggtaacgagcgcgatattcttcgttttcgccttctcggccaagcgccaatcatcaacgtcaatccaggccacattgtgctgccagaggttgcggccgttccggtcggtcagacgctcaccctgcaaagcgtgcaccatgttttggccgaagacgatacgccggtgcgtttcgctctcgccgacgtgcgtatgaaagacggtcaaacggtcgagattctcgccgggcactttatggcgggtgaaaccaagatgctggatgcgttccgctgggagatcattgcctccgtgctgctggcgtatgtgctgatcgccggactcggttacgtggttatccgtcgcggactacgcccgctgcagaaaatggccaatgaggccgcaaaaatccatccaaccagcctgtctacgcggctaagtgaagagggcgcaccgctggagctccagcaactcattgtttctttcaacgcgatgctcgacaggttgtcggacggttatcagcggctcaatcaattctcggccgatttggcgcacgagatccgcacgccggtcggcgcgctgatggggcattgtcaggtggccctttaccaaacccgcacaacggaagagtatgagaccctgctggccaataacatgggcgagttggagcgtatttcgcgtatggtcgagaatatcctcttcctggcccgcgcctcgcatgcacgttcggtgcttaatattgtgccgctgtcgatggagaacgaaacgctgcgggtggtggactattttgaagggctggccgaagagcgcggcatacgcctggcgtgtgaaggcgagggcgtggtgtttgccgacgctctgcttttccagcgggcgctgagcaacctggtggctaacgccattaattacggggatgaaaacagcgaggtcaaggtttgggtcgagcatcaggcacagagcagcgccgttaacgtcgataacgccggtccggctattcccacggaccagatagacaaactgtttgaccgtttttatcgtgcggatccgtctcgtagcgaagggggagctcaaacggtctggggctggcgattgttcaggccattatgacgctgcatcgcggcagtgtgtcggtctcgaatcttccgcagggcagaacacgtttcacgttgaccttccctcgagcgtagaaaccgaggcgataaactcatcgttaaataaatattaaataaagcgtaaaaagtgtatttttcgtcctcacgtaacgcaatgaaatataaggatatcgttaattttgttacattttcttagtcaatgtaataattgaatttatgagaaatcggcattttcagggtctcatagtgtcatcggcagccacaaattgacgcttttaggtcatttgcctccggcacgggcgcgcagcatacgcgaatagaacctttgaaagagcttttaccgactgatgtataaaatacgagacttatcgcaacagaagatttcactttttattgctttgtacctgggaatattgctcaaccttccaattttttaccgtcgctatcacgaattacactatgacaataccttgtctttgatggttgagatggtggcggcatttgcgttggtctatttcctcaccaagcttgtctcctttaccggtaaaaccgtgtatcgagtgctgctttctattgttgtcgtggcctctgtggcggcggcttactacatgattatcttcaatgtcgacatcggctacggcattctggcttcggcgctggcagtggactcgctcgacctgtctaaagagtcggtgggcagccacttctttatctggctcattgccgttagctttatcccgcttatcctgctttggggcagtaaaatgcccggttcgtcgctgaaagaaacgcgctttcgcaccgttgccatcaaaatagtgcttttggttgtcagtggactggcctgttgggtgccactcaagttgatgggcggcgcgcaggaagcgcatgaccgcataaacaaccgcatgatggccagctacggcggtgtagtggcgggagttacttaccttctaactggttgtccgggctgggtctttatatctatagctcctacagtcaggccgaagatactaaaaatctcttcgatccttcaaaacatttcacttatgtgccgccaaaagacgtgaaagatctgtacgtggttttcgtgattggcgaaagcgcacgacgcgaccacatgggcatttacggctatgcgcgtgacaatacgcctaaccttgagaaagagaagaatctggtcgcgctacagggatattcttgcgatacctcgaccaaactttcgttacgctgcatgtttgtacgtatgggcggaactcgcgacaatccggagcggactctcaaagagatgaacgtcttctctgtgcttaagaatcagggctttagttctgacctgtactccatgcagagtgaagcctggttctacaacaaaaccaaagccgatgaatactcgctgcgtgaaagcatcggctctgaaaagcgcaatgccggtaaaccggtcgacgatatgttgctgatcaacgaaatgaaggactcgattgccaaccatccacagggcaagcacctgattattctgcataccaaagggtcgcattacctgtattcagagcgatatccgcgtaacttcgcacgctatcagccggagtgtatgggcattgatgacgcctgctcgaccgaagagatgattaacgcttacgataactccctgctttataccgatgatttccttgagcaggtgtttaatcagatgcgtgataaaaacgccatcgtgttctatgcttccgaccacggcgaatctatctcgcaaaacatgcatttccacggcaccccgcgggatcatgcgccgattgagcagcgtaccgtccctattatggtgtgggcatctgacaaattcctggccaacgatcagaatcgtcaggcgtttcagcagttgcaaatcatggccaggaacaaagtgccggcctatcatgagaaacttttcgacagtatattaggttgtattggctacacttcgccgaacggtggcatcgtggaacagcataactggtgtcacgtaccgactacgggaaaataatgagaacaaaaaatggataatgcgcgtctagtggtggggattctcaccctgattatgacgttgttgaccctgttgcctttatctcgtaaccagcgctggtgggtgcgtatctgggacttcccacgcctgcaaatggccgtgttgtcgctggtgtttctcctgcttgagttgtgttttctgcccggaggcgggcagttttcatggctcatcgtgctgctcgccctgggttgcacgatttatcagagctggtggatatttccctacactggcctttcgaaagtgcaggtaaaaaaaacgcccgccagccagcatcctcgcattaaaatcctcaactgcaatgtgctgatgaccaaccgcaagtctgaaaaactgcttgaaatccttgcgcagaacagacccgatgtcatcgtcctgctcgaaaccaatctatggtgggagcagcagatggcgccgttgcaggccagtcatccctacacgctcaaatgcccgttagagaacctttatggaatgcacgtctactcgcgctttcccctcattgaggcaaaaattcagtatctggtggcggaggggatcccttcgatgcattttcgcgtcgagcttgagggcggggagcaggtggttctgcactgcctgcatccgatgccgcctagcccgaccgaggacgacgagtctaccaaccgcgacggcgagctgattgctgtcgggcatacctgcgcacgggcgacttatccaaccattgtgaccggagacctgaatgacgtggcctggtcacggactacccggctgtttatgaaaatcagcgggctgctcgacccacgtcgcggacgcggaatgtttaatactttccacgccagctatccgtgtttccgttggccgctggaccacgttttccacagcaaagacttcacgctggttgacctgaaacgccttgaacctatgggttccgatcactttccgattatggtggaactggtccttaatcctcgagagggcagtacgcaggagaagctggaaattgagcagggcgatatcgaggaggcgcgcgagaaaatgacccacgccggaataaaaagccgcgatgttcatcaggcaaagcttagtgatatccagcattaagcgattatttttatttgttgaagaaggggttggcaggtcaagggccagcgcgcaaggcgcgtgcccttaacctttaatcccgttactccggaaacgtcaacgtattgcccggcgcttcccgattgatgtgcaggaagtttaggtgacgctcgtactggtccagaatatcgttgatcacctgatgcttggtaaagtccatcaggtcattgccctgcgtgccctctagcaaaaaggtttccaggcgataatagtgcgatttgcccgaacgcgcgcgataggtgaagcccggtacggcgtagcgctgcggccaaatctgatagataaagttctgctcttcacccagtttgaccagcagctccagatggttgagtttctcatcatccaccggtgcgccttcggtaaattctaccttggcaccgcgcagcttcagctcgttcgctacctcctgcatcgcaggacggcagacaatatccagcatcttctgcgtgtgcgtggttcccgggaagttcatcaccctcgacagacgctgcttccagttcagtgctgcatcaccggcggacggtgtcgcaggcgcaaagttttgcagcgtactggcacgtcgataatcctcaagacgcagcgatttatacagtccggccatcacaaagaagataacgaagctaaacggcagtcccatgataaccgtcgtgttttgcagcgctgatacgccgtcggtcatcaacattcccagcgtcagcacgccgatggtgaccgaccagaagatgcgcagccagttgggggcatcgttgttgatatcggccagcttagaggtgaagttccccagtaccagcgagccagagtcggccgaggtaacgtagaacagcaggccggtgatggttgccacagaggcgctcagcgtaaagcctggatactgcgccagcaggctgtaaacgccgcgctccgggtgcgcaatcacttcgttggcgaaggcaatattgccgtgcagaatctgatacagcgcgctgttgccgaaaatagacagccagaacagcgtgaacacgaacggaataatcagcgtccccagcacgaactggcgaatggttctgccacgcgaaatacgcgccaggaacaggcccacaaacggcgaccaggcaacccaccaggcccagaagaagagggtccagctgttcatccactgcgttgggcggtcaaaggcgaaggtgttgagcgtcatgcccataaagcgattgatgtaatcaccaatattcagcaccagcgcattgagcaggaactcggtattgccgaagaacagcaggaacaggataagccccagcgccagcagcacgttcaactcggaaagaatacgaatgcccttgttgacgcccgaagtgaccgacaccgtggccattattaccgacagcaaaatcagcgccgcctgcacccccagaccttccgggatatggaacagcactttcaggccgtagtttagctgaaccaccccaatacccaaggtcgtggcgataccaaagatagtgccgaccaccgccgcaatatccacgctgtggccaatcgggccgtagattttcttgccgaaaataggatacagcgccgagcggatggtcagcggaagattgtagcgatagctgaaataaccgagcgcgatacccatcagcgcatacattgaccagccggtcaggccgtagtggaacagcgtccagaccatcgcctggcgtgccgccgcaatgttctggccctggccttccggcggcatcatatattgcgtgaccggttcggctaccgagaagaacatcaggtcgataccaataccggcggcaaacagcatcgaggcccagctcatcatggagaattcaggttttgactgctcgggcccgagcttgatagagccaaagcgcgagctggcgataaataccacaaacacaatgtacagcgttgcggccagcatgtaataccagccgaaggtggctgatacccattccagcgccacgctaattgcttttcccgagatatcggtaaagaaaatggtcatcagcgtaaaggccagaatcagccccgccgaggtaaaaaataccaccttgtttagcgagtctttaggtttttccgaaagttcgatagaagccatcgttttcccgttttccaaaggtcataaaagacaaaacacaaggtcgggagtggtgtttaaaagcagcgcgccttagcgcatatcaagaacaccggggacaaggtttatgacgctaaaaaaatgtcctgacaggagatccgctgagtgcactggctttaaaacgccttcatcgacctgaaaataagcaagttctgatattgccagtaacctgctttttatcaaccgcttgtgaaagaatttgcctcaatgtttctacaaattcgttaccagacggtaataaaatatattcattttttattgaacgttcaatcaaaaaaaagtttaatagggacagttccggcgttaaataaaattgaaacaggcatcaatacagccgtttcatcacgccattttcaggagtggagtcaatgccaaaagttggaatgcagccgattcggcggcagcagttaattgatgcgacgcttgccgccgtgaacgaggttggcatgcatgacgcctcgattgcccagattgcccgtcgagcgggcgtatccaacggcatcatcagtcactattttcgtgacaagaacggactgctcgaggcgacgatgcgttatctgctgagccacctcggcgacagcgttaagcaacgactggctacgcttaacgacgatgcgccgaccgcgcgtttacgggcgattgcacaggcaaactttgatgaagggcagaccaacgatccggcgatgaaaacctggttggccttttgggccagcagcatgcatcacccccagctgtaccgtttgcagcaggtcaacagtagaaggctctactcgaatctatgcgtcgaatttcgacgatttttacctcatcacgaggcgcgtctggcggcgaaaggcctggcaggactgattgacggtttgtggttacgcagcgcactgagtcaccaggtgtttgaccgtcaggaagcgttgctgattacgcatcgctacatcgaatcactggcgcagtctgccgcacgctgaaggtcaatgccttcactttgtcgcccgctttgaaacaggagaacttatgtcccgctttggcatgcaaaaactttatatcgacggtcgctatcaggacagcaccggcggtgaaacttttccggccatcaacccggccaacggtgaaatcctcgccgagattgcttctgcgtcccgcgaagatcttgaccgtgcggtagaagcggcgcagaagggacagaaagtctgggccgcgatgacagccatgcagcgctcccgcatcctgcgcaaagccgtggatatcctgcgtgaacgcaacgacgaactggcgcaaattgaaacgctggacaccggaaaaccgctgtctgaaaccaccgccgtggacatcgtcaccggtgccgacgtgctggaatattacgccggtctgatcccggccatcgaaggccagcagatcccgctgcgcgacacctcgttcgtttatacgcgtcgtgagccgctgggcgtggtcgccggtatcggtgcctggaactatccgattcagattgcgttgtggaagtctgcaccggcactggcggcgggtaacgccatgatcttcaagccgagtgaggttacctcgctaaccgcgctcaagctggctgaaatctataccgaagcgggtgtgccggacggcgtgtttagcgtgctgaccggtaacgggccgagattggacagtatctgaccgagcatccggggatcgcaaaaatctccttcaccggcggcgtggttaccggcaagaaggtgatgtcgagcgcctcagcttcgacgctgaaagaagtgaccatggaattgggcggcaagtcgccgctgattatcttcccggatgccaatttggatcaggcggcggatatcgcgatgatggccaacttctacagctccggtcaggtgtgcaccaacggcacgcgcgtgtttgtgccaaaacatttgcaggccgagttcgaagggaaaatcgttgaacgcgtcaagcgtatcaagctgggcctgccgaccgacgagcaggtcaactttgggccactggtcagcttcccgcacatggaaaacgtgctgcgctttatcgaaagcggtaagcgggacggagctcgtctgctggcgggcggtcaccgcgtcaccgacggcgaatacggcaaaggcgccttcgttgcgcccacggtattttccgactgcacggatgacatggaaatcgtccgtgaagagatcttcggcccggtcatgagcattctgacctatgaaagcgaagaagaagtggtgcgtcgcgctaatgacactgactttggcctggcggccggactggtgacgcgcgacctgaatgcggcgcaccgggtgattcaccagctcgaggctggcatctgttggatcaacacctggggcgaatcggcggcagagatgccggtggggggctacaaacattcaggcgtaggccgtgaaaacggcgtgagtactctcgaacattacacacaaatcaaatccgtgcaggttgagctgggcgaatttagttcggtgttttaaaccgccgaccgcaagaggagatttcaatggattacgattacatcattattggtgccggttctgccggtaacgtattagcgacccgattaaccgaagacagcagcgtcaacgtgctgctgctcgaggcgggcggtccggactatcgtgccgatttccgtacccagatgcctgccgcgttggctttccctttacaggggcgtcgctataactgggcctatgagaccgaccctgagccgcacatgaacaaccgccgcatggagtgtggccggggtaaagggctgggggttcatcgcttatcaacggcatgtgctatatccgcggtaacgcgatggacttcgacaactgggcgaaagcaccgggccttgaaaactggagctatctggactgcctgccgtatttccgtaaagcggaaacgcgcgacatcggcgcgaatgatttccacggcggggacggtccggtcagcgtgaccacgccgaaaaccggcaataatccgctgttccacgcgatggtcgaggcgggcgtacaggcgggttatccgcgcaccgatgacctcaacggctatcagcaggaaggcttcggtccgatggaccgcaccgtgacgccaaaaggccgtcgtgcgagcacggcgcgaggctatctggatcaggcaagaccgcgcgccaacctgactatcgtgacgcacgcgttgactgaccgcatcctgttcgacggcaagaaagctgtcggcgtgagctacatgaagggagacgacctgcatcccatcgaggtgcgtgccaaacgtgaggttctgctgtgcagcggcgcgatagcttctccgcaaatcctgcaacgttcaggcgtcggcccggcagcattgctgacttcgctggatattcccgtggttcatgaccttccgggcgtgggtgagaacctgcaggaccatctggagatgtatctacagtacagctgtaaacaaccggtgtcgctgtacccggcgctgcaatggtttaatcagccgaaaatcggtgcggaatggctgtttaacgggaccggcgtgggcgcgagcaaccagtttgaggccggtggctttattcgcagccgcgaagagttcgactggccgaacattcagtatcacttcctgccggtggcgattaactacaacggcagcaacgcggtgaaagagcacggattccaggcacacgttggctcgatgcgttcaccaagccgtggccgcgtgcaggtgaaatccaaggatcctcgccagcatccgagcatcctgttcaactatatgtctaccgaacaggactggcaggagtttcgcgacgcgattcgcatcacccgcgaaattatgaatcagcctgcgcttgacccttatcgcggacgtgaaatcagtccgggtattgaggtgcagagtgatgaagaacttgatgccttcgtgcgtgagcatgccgagacggcgttccatccatcctgtacctgtaaaatgggcagcgacgagatggcggtggttgacgggcagggccgtgtacacgggatgcaggggctgcgcgtggtggatgcatccatcatgccgcagataatcaccggcaacctgaacgcgacgaccatcatgatcgccgagaaaattgccgatgctattcggggccgcgaggcgctgccgaaaagcaccgccgagtattatgtggccgacggtgcgccggtcagaggcgaacccctgaaggccgtgacgctgaaaaaaagcgcctgagcatagatttaccgcccagaacgcttaaggcatgatgaaaagagataacctcgggttatctctttttttatgtctggtccttttcagcgtccgagaggtttccatgaatcaatcccacccgctactgcgtgaacgcaacggccatgaagcgtcggtctcctattccgaactgctgtttgacctcatctatgtctttgcggtcacccagctttcacattatctcctgcatcacctcagctggactggcgcgctgcaaacgctggtcatgtggttcgcggtctggctggcgtggcagtacactgcctgggtgaccaactggtttaaccctgatctgcgtagcgtgcgcctgatgttgtttgccgtaatgctgatggggctgtttatgtcctcggcaatccctgaggcttttggccaacgcgggggagtgttcgctctgtttctggtgctgatacaggtggggcgtacgctgtgcgtgctgagcatgcttggctggcaacatgcgctctcaggcaatttcaaacgtattcttggttgggtgtctatctcggcggtgttctggctggcgggtggcgtttgtcagggtgagaccaggctgctgctctgggccatcgcagtgctgtgcgaatatgtgtcaccgatgtttggttttccgctacccggattgggacgttcaagcagccgccgtgagtggacgattgacgggcatcatctcgccgagcgcaatcagctgtttgttatcgtcgccttgggtgaaaccattttgatcaccggcgcgaccttgagtgagctcacgccgtggactcccccggtgattattgcctcactcgtcgccttcgtcggcagtttggcgctgtggtggatttactttgatacctccagtaaagccggaagtgaagcgatcgtccatgcgaaagatcccggaaaaatgggggccagatttcactacgttcacgtggtgctggtcggcgcgataattgtctgtgcggtggcgaatgagcgggttatcaacgagccagcaagccacatcaataccctcacggcagccgtgctgataggcgggcctctggtttatctctgcgccaatgcggtctataaactttttgtttatcaacgtatcccgttatcacatcttgtcggcatcgctgcgttggttgtgcttgtgccgttcagtttcgttactgacgtgctgatggtaaacgggctcacgacgcttattgtcattgtagtcgccgcatgggagagcatctcgcgggccaggaaaacggaagtaacatctccatagcatttatgcagcattttttgaaaagacagaagccagaaagcagaatcacagaaagatgaactttatgtgatatcgatcacataaagagtgtatgaaaatgaaacgtaaattgacaaatgttgaccgaatcgataattaagaggcggcgctagggcggctacagatttttctgagaaggcgtttttttgaacgcgtttttcccggaatgttgccgaattttgccttgtcatttttgttcgtttttaacacccacagtctccttgatacagggagttgctttctcattgcttctggtaacccatgaaaactaaaattttactagcaggtgcacttctcgtttcttcttacagcgcgcaaacgcttgctgacgacggcaaagatcaatatgtttccgactggtggcatcagagcgtcaacgtcgttggcagctatcacacccgttttggaccgcaggaaaataacgatctgtacctcgagtatgaagccttcgcgcataaagactggtttgatttttacggttatgtcgacttgcctaaattctttggcacaggcaacggcaatgataacggtatgtgggacaagggggccggttctccgttgttcatggagattgaaccgcgtttctctatcgataagctgaccggtaaagacctgagcttcggtccgttcaaagagtggtatttcgccaacaactatatctacgatatggggccgaataacgccaaccgccagaacacctggtatatggggctgggcaccgacgttaacacttacaccccgctgaacctgtctctgaatatttatgctaaataccagtggcagaactatggtgcagcgaatgagaaccagtgggacggctaccgtttcaaggttaaatacttcttgccactgggtgagatgtggggcgggaaggtcagctacatcggtttcactaacttcgatttcggttcgcagctggcggacaacgaaaactactcgcgcactaaccactccatcgcttcaagccacatcctggcgctgaactatgcgcactggcactactcgctagtggcgcgttacttccataacggcggtcagtgggctgacggaactgaactcaacttcggtaacggcaacttcacggcgaagaccaccggatggggttactacgcagtgatcggctacagtttctaattgattgttttaaaacaataaaaaaaccgtcgcagaggagcattcctgcggcggttttttattcgtttaactttcgtttaattattttgcattagtttggggaaaaattaagaaatcattatgaaaatcgcctgcgcttctccacaatttgaactatctattaagattgtgtaattgttgctgggttgattgtaaaaaggattatttatatgctcccttcttctcatgttgcgcgtatttttgtcggttgcgatcccaacgattgtgatctcgaacaaatgatggtgctggaatacagtctgcgtaaacactcttctattccgattgaaattgaatggatgaggctttcgcgtaaccccgacagtttctggtattccgacggcaaaggcagtggctggactaccgatcgttgggcaacgcctttctcggcttttcgctggggcattccggcgtactgcaactttgagggaagggcactgtatctcgacgccgacatcatgttcatgagcgacgttgccgagatgtggaatcacccgatcggcggaggccgggcgatactggcttccggcgcaggaagagagctgcgtctgggtgagctagtgtgggactgtgcggccgccaaagcggttgtgcctgatatccatcagttgcaccgcgacccccttggccataaaaagctgcaaaatttctttgaggaaaatccgcacaaagttcagccattgggcgcggaatatagcaatatcgacggggatgacatcccgattgagcagctgaaggcagtgcattactccaagatggatactcagttctcgcatcagttttcactgccgcgtttgcaggccgagcagaagggacactggtttgacggcagaattgagccgcatccgcgccaggagctcgctgacgtgtttgagcagtactatcatgaagcgattgccgcagggtattccatcgacgactatcgcaatcctgaggtcttcggcgaattcaataaacagtcgcaaaacacctccggcaacaaaaaaagaaaaccgctcctcaaacgcctctttggcagcctggtgagctaagttttaaggctttcacatgcgctattcctacggatagcgcaataattcaccaaaacttcgcacgatctcttcccctgtttatggcataatgcgcgccaaatcacgtaactcaattaaacttaagagcgagctctgtgctaagtacttacaacatcaccatgcaattcggcagcaagccgctatttgaaaacatttccgttaagtttggcggcggtaaccgttatggtttgatcggcgcgaacggctgtggcaaatctacctttatgaaaatcctcggtggcgaccttgttccctccggcggtaacgtcgtgctcgacccgaacgagcgtctcggtaaacttcgtcaggaccagttcgccttcgaacagtacagcgttctcgacaccgtcatcatgggccactccgagctgtgggaagtcaaagaagagcgcgacagaatttacgctttgccagaaatgagcgaagaagacggctataaagtggccgacctcgaagttgcctacggcgaaatggacggctacagcgccgagtcgcgtgctggcgaacttttgctgggtgtcggtatccctgttgagcaacattacggcccgatgagcgaaatcgctccaggcttcaagctgcgcgtattgctggcacaggcgctgttctctgacccagaaattctgctgctcgacgaaccaacgaacaacctcgacatcgacactattcgctggcttgagcaggtgctgaacgaacgtaacagcaccatgatcatcatttcgcacgaccgtcacttcctaaacatggtttgtacccacatggctgacctggactacggcgagctgcgcgtttatccgggcaactacgacgagtacatgacggccgcaactcaggcgcgtgaacgtctgactgccgacaacgccaagaagaaggcacagattgccgagctgcagtcctttgttagccgctttagcgccaacgcctccaagtccaagcaagcaacgtcacgtgcgcgccagattgataaaatccagctcgacgagatcaaggcctccagccgtcagaacccttacatgcgcttcgagcaggacaagaaactgttccgtaacgcgctggaagttgaaaagcttactaaaggcttcgacaacggcccgctgttcaaagacttcagcctgatgctcgaagttggcgaaaaagttgcgattctgggtgccaacggcgtgggtaaatccaccatgctgaaaacgctggtcggtgatgctcagcctgacagcgggaccgtgaaatggtctgaaaactgcaaaattggttactacgcgcaggaccacgaatacgagtttgacgactcgctgaacgttttcgactggatgagccagtggaagtccgaaaaggacgacgagcaggccgtgcgcggtattctgggccgtctgctgtttggtcaggacgatatcaagaagaaagtgaaagtgctttccggtggtgaaaagggccgtatgctgttcggcaagctgatgatgcagcgccctaacatcctgattatggatgaacccaccaaccaccttgatatggaatctatcgaatcgctgaacatggcgctggaaatgtacgaaggcacgcttatcttcgtttcccacgaccgcgagttcgtgagttcactggcgtcgcgtatcattgaaatcacgccaaacaaaatcactgacttcaccggtaattacgaagattacctgcgcagccagggcatcaacgactaatcaatcaggttgttgtgccaatagaaaggccggtcattctgtgaccggcctttttttgtctccgctattgcccgcaaacgtcgcagcgcggattttttggcagcttcatttcacgaaactgcagcgtcatggcgtcaaacattagcagccttccgcttttgatttccccatagccggttagcagcttaatactctccatcgcctgtaaactgccgatggtgccgaccagcgggccatgacgcccgcctcgacgcaggttagcgcttcttcgccaaacaaccggctcaggcagcggtaacagggctcgtcatcgcgataggtgaagacgcttatctgcccttccatacggatggccgcgccggacaccagcggctttttgagctgaaagcaggcctggttcaactgattacgcgtggcgacgttatcggtgcagtcgagcaccacgtcgcattcgcctatcagcgcgcgtagcgcgtccgattcaagccgttggtcgatttgctgcaaactgacgtgcggattcactgccgccagcgcgatggccgccgaggccacttttttcatgccgatgcgcgcatcgctgtgcagcgtttggcgttgcagattggaaagagagacgctgtcgaaatcgagcagggtgagggcaccgataccggcagcggccagatactgcgcggctgcacagcctagcccaccgagtccgaccaccagcgcacggctggccttgagcttttcctgcccgtcgaaatcaaagccgcgcagcactatctggcggttatagcgcagcgtctcggcgtcgctcagttcaggcagcgtcatcattttattcctttaacagcgcgttgaaaggctcaacctcaacccattctcctacagcgacgtcaccacgctcgcgttcaagtaccacaaagcagtttgccaggctgtaggaactgaacacgtgcgagccctgcggtccggtggtgtacgcttccagctcgccttgagcgttatggttgaaaacggcacgctggaaatcgaggcgtcccggcgttttcttgaaacgagtcgccgctctggcacgcaggcgcggcggcagacgccagtcgctctgcgccgagagttgggcgatgagtggctgtaccagctgataaaaggtcagcacggccgagaccggattacccggcagaccgcagaaccaggcgtttttcagcttaccgaaggcaaagggtttacctggcttgatggccagcttccagaaaccaatttcaccgagctcgtcgagcatcgttttggtgtaatccgcttcacccaccgacactccgccgctgctaatgactaagtcggcaaagtcgtcggcctgctcaaaggcgcggcgcagggcaacggggcagtcgcggataataccgagatccagcacctcacatcccagctggtcgagcatcaaatgcaccgcgaaacggttggtgtcgtagatttgaccttcctgcaatggcgtaccgacaggctgtagctcgtcaccggtagagaaaacggcaaccttcaggcgacggtttacctcaactttttcgataccgagcgaggccaggagcggcagatgcgccactccgagtctcacacccgcttccaggacttcctgtccttcacgaatatcgtcaccgatgaggcgaatattttgaccggcttcgatctgcgcggtgaaacgtacaccggcgtcggtaacctcagcctcttcctgcataaccaccgcatcggcgccttcaggaatctgtgcgccggtcatgatgcggatgcagctccccgcaggccattcgccggagaagggagcaccggcaaaggctttgccagcaacggggaagattttgtcggcgctaaattcgctgcgacgcagggcatagccgtccatcgccgagttgtcgaacggcgggacaaaaatgggggagcgaaccggactggcggtaatacgacctgcggattcggtcaaagggagccattcggtggcggcatttgtcagcggcgcggtctgcgcgagcattttatccagcgcttcctgcagagaaatcaggcctgaagtgaacgtattttccattattaaacccttttattaccggctaacgactgcagggctgcatgcgaggtgcgccggtcaaagtgacaaaacactctttttattatgccagagaaaaacactcacccccaaactaacgccagagcattaactctgcgtaaagccgggcagcattagcagaaatcggcattaaaaaagtttatttagaatgaaaaatttgcgaaaacattctaaaagaatgagatcgatcgcaaaaatgattgccgatccgtcgtatgattacacgcttttttgtgactgctatcacactaaattgtcttctgcatctggagttacatcgtgatgaaaaaaaaccgccatcaggctatcctgaaactggtggatcagcatgaggtagttcaggttaacgagttagcgctttggttagaggtgagtctggaaacgattcgccgtgacttaaacgaaatgcaagacaaaggattgattcagcgccgccatggtcgggcacgtcgtgtagatccaccgccttcgtacggttggataaacagcttgcagcgcgtctcacacagctgaacacccgcaatatagagaaggaaaatcagcgtggctgattttcctttttttgtttacccctttcgttattcgatctcctgactaaatttctataaatattctaagcaattagcgtcatgaggctggatttcattttcagctttacatacgctgaccggctaaatatagtcaaaattctcgattattctttatacggccttctcggctccaagagcgcatgacatgagcacaacaattccaactgctgttaatgaaaagcccgctgcggctattgctattcacggcggtgcgggtgccatcacccgtaaggcgatgagtccggagaaagaacgtctctatttgcaggcgctggagcggattgtcagcagcggtcaggccattttggcggcgggcggcagcgcactcgacgcggtaacagaagcggtgcgcctgcttgaagagtgtcctttattcaacgccgggacgggcgcagtcatgacccatcagggcacgcatgaactagacgcctgcatcatggacggccgcacgctcgactccggcgcggtgagctgcgtgagccacatccgtaaccctatcctgaccgccagaaaggtcatggaagaaagcccgcacgtgctgtttaccggcgcaggcgcggaaacgtttgcccgcgagcatgggcaggaaattgtctctgccgactatttctatacccaggaacgttacgatcagctgatgcgtgccagagccagtgaaggcgtcatgctggatcacgacgcggcgacgctcaatgcgacagcgccggacgatcctttggatcccgatcgcaaatttggcaccgtgggtgccgtggcgctggattctttgggtaatctggcagcagcaacgtcgaccggcggtatgaccaataaacaggccggacgcgtcggcgacacgcctatcatcggcgctggctgctacgctagtaaccagacggtcgctatttccagcaccggcactggcgaagtatttatgcgcaccgtggcagcctacgacgtggcggcgctgattgactatgcgggcatgacgctgcaacaggccaccgacaaagtggtcatggaaaaaatcggcgcgctgggcgggtccggcggcatgattgctatcgaccgtttcggcaacgtctgcctgccgtttaacagtgaaggcatgtatcgcggttttgcctacgtcggccagtctccgcaggtcgctatttatcgataagtctccttatgttgcagcaaaagtattcagggagccgtaaattttaaggagtcttggtgagccagattatttctcaatcctcgccgttgtctgtgccgaccttgccggatgaaaaggtgctgtcggtacgtaatcttagcgtccgtttcgagcatgaagggcaggccattgacgcagtgcgtgacctcagcttcgaggttaatcgcggtgagacgctggctatcgtcggcgaatctggttccggaaagtctgtcacctcgctggccttaatgcgtctggtggagcagggcggtggcgtactccatcagggtaaaatcctttttcgacgccgcaagggtgaggtgattgacctgaccgccgcacgccagtccgagatgcgcagactgcgcggtgcggacatggcgatgattttccaggagccgatgacttcgctgaatccggtgtttccggtcggggaacagattgccgagtcgattcgcctgcatcagggcatgagccatgcggccgctcgcgcagaggcgctgcgtatgctggaactggtgcgtatcccacaggcgaaaaatatcctcgatagctatccgcaccagctctcgggcggcatgcgtcagcgggtgatgatcgccatggcgctgtcgtgcaaaccggctttgctgattgctgacgaacccaccaccgcgctggatgtcaccattcaggcgcagattctgcaactcatccgcgtattgcaaaaagagatgcagatggcggtgatttttatcacccatgacatgggcgtcgtcgctgaaatcgccgaccgcgtgctggtcatgtacaagggggaaaacgtcgaaacgggcgacgtgagccgcgttttccataccccgcagcactcctacacccgcgccctgttggcggccgtaccgaggcttggggcgatgaaaggaacgcagctgcctgcgcgtttcccgctgctcaatgtcgccgaagatcctcttgctcccctgacgctgggctgacgcagtcaacgctcgttcccggtgcccctcccattttgcaggtgcgcaatctggtcacgcgctttccgctgcgcagcggcctctttaatcgcgtaacccgctacgtgcatgcggtggaaaaggtcagttttgacctctatcccggcgagacactggcgctggtgggagagtcgggctgtggtaaatccaccaccggccgttcgctgttaaggttggtcgaaagccagagcgggtcggtgattttcaacggtaaaacggtgtttgacggcgagcatgccgggcagctttccggtgccgcattacagcaccttcgtcgtgacattcagttcatttttcaagacccttacgcctcgctcgacccacggttgaccgtcggttattcgattatggaaccgctattggtgcataagattggcacccggcaggaggccagagcgcgcgtcgcctggctactcgagcgggtcgggctgctccctgaacacgccgatcgttatccgcacgagttttccggtggccaaaggcaacgaatctgtatcgcgcgtgcgctggcgctgaaccccaaggtggttatcgccgatgagtcggtctcggcgctggacgtctccattcaggcgcaaattgtcaatttattaatggatttacagaaagagttcggcatcgcgtttctgtttatttctcatgatatggcggtcgtggagcgcatcagccatcgcgttgcggtgatgtatctggggcagattgtggaaatagggccgcgtgcggcggtattcgagaatccacagcatccctacacccgcaagttgatggccgccgtgccggtggccgatccctcccatcgacgcgccgagcaggcgctgctggtggacgaaattccaagccccatccgcccgattggcgatgaacctattattgcaccgctggtgcgtgtctctgaggggcactatgttgcccgtcataccattgccagcgtttattgacagtcgaagggtacctctacagggtcttttataaatctaaggtaaaggaaatcagtatgaagcagaaaatggtgcgcaaggccgttctggcgaccttaatggtcagcgcgatggcttccggctcggcctgggcagcgaaggacgtagtgattgcggtcggttcaaatttcacctcgcttgacccttatgacgccaacgatacgctctctcaggcggtggcaaaatccttctatcagggcctgttcggctttgataaagatatgaagttggtcaacgtgctggccgacagctacaccgtgagtcaggatggcctgacctacaccatcaagctgcatccgggcatcaagttccaggacggcaccgatttcaacgcacaggcggtgaaagttaacctcgatcgcgccagcaatcctgacagccacctcaagcgctacaacctgttcaaaatgatcgccaaaaccgaggttgtcgacgcgaccacggttaaaatcgtgctgaaagcgccattctccgcttttatcaataacctggcacacccctctgcggtgatgatttcccctgctgcattgacgaaatacggcaaggacattggcttccatccggtcggaaccggcccttataccctcgatcagtggaaccagaccgacttcgtcaaggtgaagaaatttgacggctactggaagaagggtgagccaaagctggataccatcacctggcgtccggtcgtcgataacaacactcgcgccgcgatgctgcaaaccggcgaggcggatttagcctatccggtgccttacgagcaggcggcgctgctggagaaaaacagcaagctgcagctggtgacctcgccgtcgatcctacagcgttatatcagcttcaacgtgacgcaaaagccgtttgataatctgaaggtgcgtcaggcgattaactatgccatcaacaagcaggcgctgatcaaagtggcgtttgccggttacgccgtgcctgccgaaggcccactgcctgcaagcatcgaatattcggctaagtatcagccatggccttacgacccggccaaggcgcgcgagctgctgaaagaggctggttatccgaacggtttcaccaccacgctgtggtcatcgcacaactcgagcaccgctcagaaggtgttgcagttcactcagcagcagctggcgcaggtcggtatcaaggtaaccgtgaccgcgtttgacgccgcgcaacgtgcggctcaggttgaaaacgtgggccagaaggagtcgggtctgcggatgttctataccggctggtcagcttcaacgggagaagctgattgggcgctgacgccgctgtttgcaacgcagtctgcaccgccgaagcagtttaacaccgctttctatagcaatcctcaggtcgacaaagatctcagcgatgcgctgaataccaccgacaaagccgctaaggccaagctgtataaagatgcacaggaccatatctgggctgacgcgccgtgggcattcctggccaccgagcgcctgctgtcggcaagcaacaagcgtctgaccggtttctacgtgatgccggatacgtcgttcaactttgataatgccgatgtgaaatagcatgactgcatgccccgtggtttcgcgcggggcactgcaggaaggcccaatggatcgagttaaccatttattatgctgaattattttatcaaacggctgctgggcctgatcccaaccttgcttatcgtggccgtgttggtgtttttatttgtccatctgctgccgggtgatcctgcgcgtatgatggccgggcaagatgccgatcagagcgtggtggaactggttcgtcaggatctggggctggataagcctttgtggcagcagtttctgaccttcttcggccatgcgctgcgcggtgattttggtcattctatggtgtcgaagcgaccggttatcgatgagatagcgtcccgctttatgccgacactttatttaacgttgaccagcatgctgtggtcggtgattttcgggctgattattggcgtagtgtccgccgtgtggcgcaaccgctggcccgaccgtctgggcatggccttggccgtatcgggcatttcgtttccggcctttgcgctcggtatgctgttgatgcagattttttccgtcaatctgggctggttaccgactatcggagcagacggctggcgtaactatattttaccctcaatcacgctgggagctgcggtggcctcaatcatggcacgctttacccgcgcgtcttttgtcgaggtcatgcaggaagactatatgcgcaccgcgcgggccaaaggggttcgcgagtccgtggtcgtggttaagcacgggcttcgcaacgcgatgatcccggtggtgaccatgatgggcctgcagtttggtttcctgctcggcggatctatcgtggtggagaaggtctttaactggccgggactgggacgcttactgattgattccgtcgagatgcgcgactatccggtgatacaggcggaggtcctgctgttttcgctggagttcatactgattaacctgttggtggacatgctgtatgccgtcatcaatccttcaattcgatataagtgagtgagcgcatgaaaaactggcgacgcaaagccgcgctggcatccatgccattagtaactcgagaaagcctgagccagccgccggtgcgtacgccgctgcgcgcattctggcgacgtttccgcaaacagcatattgcgttgatagcgggcgcgtttgtcatcctgttgatcgcggcggcggcctttgctccctggttagtgccgttcgatccggaaaattattttgattacgatcggctgaacgaagggccctcgccgctgcactggttaggcgtggactcactggggcgtgatatctttagccgcattctgatgggggcgaggatctcgctggcggcgggcgtgttgtcggttatcctcggtgcggccatcggtaccctgttaggactgatagcaggctactacgagggctggtgggacagaatcaccatgcgcatctgcgacgtgctgtttgcctttcctggtatcctgctggcaatcgccgtcgtagcggtgatgggcaacggcatggccaatgtgattgtcgcggtggcgattttcagcattcccgctttcgcgcgtctggtgcgtgctaatacgctggtgctgaaagggctaacttatatcgagtctgcgcgcagcattggggcgtcggatgtcaccatcctgtttcgccatattctgccgggtacgctgtcctcgattgtggtgtattttacgatgcgcatcgggacatcgattattactgcggcaagcctatcgtttctcggcatggggcacagcccccgacgccggagtggggtgcaatgctcaacgaagcgcgggcggacatggtcactgcgccgcacgaagccattttcccgagtctggcgatatttttgacggtgttggcgtttaatttattaggtgatggtctgagggacgcgctggatccaaaattgaaaaactaagactccttatctcattgggcattgcagcctgttttgcccaaatctgactcaaatacttaagcggcgttttatttttctctctatagtctatcgcttcagaaaccctgtctggaaggtacagcattcaatctaagtaatgcattgaaatagaaattatttataaaacccttaaattttaaatgtaaatttgacataaataatgggtaagaatactacttttttagtaaatgatatttaacttttcaatcagtaagcgttaggtcttgcattcaacatttatattcaggcgttcagcactcttgtccatgatggcgaatctacttccagtgaataacgataacaccttgtttattaatttaaaaatttagctacagtgtcgtagggtttagaggatactcagtgagaaatttatcgctggactacttataagcagtcttggcttatagcaacgttttaattcatcttgatatattagccgtcctagatcccacaatcggctttggattggttaagggtagtttgcaggtgccaatttaaaatggattatcattacgttgctggtggatatggaacgttatggtatctaaactgcttgggacgggtgggattgttctttattttattataaagtcattaatggcaacggttagcgacttgccaattattcaacggctctgttagttattcacccattcttcatggcaatttacgaacaacatactccacgtgtagacgaaaatacctttgtgctcgtgctgtcgagtatcgcttctgtactgctgatgtgggtccacaaaaaattaaaatacagactttgaggagggcttgcctcaagccctccttggcgggtcagagtcattgcccagcgcgcaaggcgcatgcccttgatccagaaattaaagaattaaaaaagccgcgctgcatggaaacgcaaatgatcttccacaaaactcgcaatcgtataatagctgtggtcatagccgggctgaacgcgcagctgtagtggccagccgcgctggcgggcgagctcggcaagtttggcaggctggagttgatcggcaagaaactgatcgctatcaccctgatcgaccaggatcgggaaggtctcttgctctgacggtaaactgctcagcagatgacagctgtcgtactgtagccactggctttcatctgcgccgagataggcggtaaaggctttacgtccccaggggacctggcaagggttcacaatcggtgcgaaggctgaggcagaacggaagcgctgcggattcctcagcgccagcatcagtgcgccgtggccgcccatcgaatggcccataattgactgacgatcgctgatgttgaagtgctcctgcaccagcaacggcagctcgtctatcaggtaatcgtacatacggaagtgcgccgcccacggtgactgagtcgcgttcagataaaaaccggcaccctgtcccaggtcgtagccttcgtcgttggccacgtcatcgccgcgcgggctcgtgtcgggcatcaccagtacgatacccagttcggccgcaatccgctgtgcgcctgccttggtggtgaagttttcgtcgttgcaggtcagacccgacagccagtaaacaaccggcggcggactgtcatcacgcggcggtggcaggtatatgctgaaggtcatgctgcattgcaaactgctggagaaatgacggtaacgctgttgccaaccgtcgaacatccggtgttcttccagaagttctatcgaaatgctcatctgttactcctttagtatttttgaaatcaatgcgtggaaacggggggactctgctgccccaaaatcagttctttcaaggcccttacgttcgggccgaaagcatctcgacgccagaaaagccaggtggccgtctcagcaaactcatcctctatctcattaacctgcacgcgctctgcgccaggcaactgcgccagcagactttgcggcagcatagcaatgccggcaccgctggcgacacaggccatcatcgagtgatatgactggatctccatcgtagtgttcgcctgtagccccgagtgctttaaccagttctccagcctttgacgataagagcagctggggcgaaacgcaaataccgtatgtcccggccggccgggcaggtcgaccatcggcgcttcacccagaggggaaataatcaccatgcgctcatggaaggcgacgcagccgtgcaggtcatcgtcgcttatcggaccgtcggccagcccgccgccagtctccccgaacgtacaccttcaatggtttcgcccgaggtggcagtggtcaaagagagagcaacctgcggataacgctggtgataggccgcgagcagccccggcaggcgcgttgccgccgaactctccatcccgccaagcgcaaattgccctgccggttcgccggtatgagtcagtgccagcgcctcgtcgctcaatgccagaatgcgctgcgcatagcttaaaaaattgtgaccgagagccgacaaccgcagacgctgtttctcgcggataaataaatctgtgccaagctcttgttcaagctggcgcaggcgggtggtcaggttcgagggaacgcggtgcagctgttctgccgcacgcgccaccgagccggtttctgccacgcagcaaaacattcgtagctgggtaagatccataggttgttctcttatcgtcacgaagtttgtttgtattattcactattcgtgattctatctttgcgccattatgattaaaagcttttattagaagcattgaatcagggttcacctgtctataaaaaaatcgcatgaggtaggtatggcatttcgtgttgcgttaacgggttttctggcctttgtcgtggcgttgggaatagggcgttttgcctttacgccacaggttcccctgatgattgccgaacatcagtttactctgaccggcgccgggctggtggcggcattcaactatctcggttacctgtttggtgcctatgacgcgatgaaatcgacgcgtcacgtggagcgccgcttgtggattggcgtctgggggcggtcgtcctgacgctagtttcggcaacgattaccggcgaagtatggcactcagtcgtgcgtttcgcgataggctggaccagcggttgggcgatggttctggttgccgcctggtgtaatgaacgtcttgcgcagctgggccgcccggcgatgagcgccgccgtttttgcggggccgggcgcgggtatcttcctgagcgggattctggccgtcggcattcacagcatggcgctgagtgcggccgaagcctgggcggtttatggcgcgttggcgctgattctgacgctgttagtgacccgtaattttccgcgagctggggagctgcaccgtcccaatagcacgcttgcgcctttgacgctgacgccagtcctcaaacgtctggtcgtgagctacagcctcgcgggctttggctacattcttccggcgacatttttttcgcagatggcgaatgcgcgtttccccgacagtctgttcgcccagtttgtctggccggtgtttggcggtgccgcgatggtaggcattgccctcggtatcttgacgcgtcactggctcaaaacccaccagcggttggccgtcgtactgtggttgcagggaataggcgtgctgtgcgccgagattgttccaggcgtgaacgggctgattattggcgcggtgctgaccggcggtggcttcctctgcgtggtgcagctggcgctgcaatatagccgcgaactggccccgacgcacagccgttatctggcgggtctgctgacgaccggttatgccatcggacaattgatgggaccgctgctgtcggcggtttcgacctcgttaacgcaccatcttgaccccgcgctttatgtggccattgccggattcctgctcgctggcgcgttggttattaagcgagtttgataacttgcggctatttcagccatcatgaaggacaatcactggattctgtggacggagtcaactaaagtaggccacctcactttgatgtgatccacgtcatggtgataataactgctggagaaaaagagaatggcgacattgagtaaagaagctgtattggttcatgaggcattgattgcccgcggtcttgaaacccccctgcgtgaagagccgtcgttagacgccgagacacgcaaagcgcggatcgaggagcacatgaccggtatcatgcaactgcttaatcttgacctgaacgatgacagcctagccgagacgccgaagcgtattgctaaaatgtacgtcgatgagatcttctccggtctggactacgcaaacttcccgaaaatcaccgtcattaccaacaagatgaaggttgacgagatgatttcagtacgtgatatcaccctgaccagtacctgcgagcatcactttgtgactatcgacggtaaagcgacggtggcctatatccctaaggattcggtgattggtctgtccaaaatcaaccgtatcgtacagttcttctcccagcgccctcaggtgcaggaacgcttgactcagcaaattctggtcgcgttgcagacgctgctgggtaccaacaacgtcgcggtatcgattgacgcggttcactactgtgtgaaagcgcgcggcattcgtgacgcgaccagtgcgaccaccaccacctcgctgggcggcctgtttaaaaccagccaaaatacacgtcaggaattcctgcggactattcgtcacaactaattacttctgtaattgattgataaatagttatttagcgtcagcacttgcggcaccctatgggtgccgttagtctatggatctttcccgcaacaggacgtcatcaatgcgcccacgtattgccacgctggattttgcccgtggtattgccatcttaggcattcttctgctcaacattagctccttcggcctgccaaaagccgcttatctgaatccagcctatgcgggagaaccttcagcgagcaacgcctggacctgggcgatactcgacgtggtcgcgcagggaaaattcctgatgatgtttgccatgctgtttggtggcggcctttacctgctgttgccgcgcggtaaggcgtggatccagtctaggctgtcgctactgctgctctgcgggctgatacatgcgatatttttctgggatggcgatatcctgctgtcttatgggctgatcggcctggtgttctggcgactgattcgtgacgcaaaaagcaatgcgtcactttttcgcaccggcgtcgtgttgtatctggcgggagtcggcatactcgtgctgcttgggctgatttcttcccccgatcccggcggatactggctgccgggctacgcggagctacagtatgaacagttctggcggctcaaagggggcattgaggcaatcaataatcgccttgatctcctctcttccagcctgatttcggtggccgtgcagtacggctgggagctgggcgggcaatgctaatgggcgcaagcctgatgcgcagcggttggctgaaggggcaatttagccccgctcactatttgcagctcgcggcgatactgttaccgttttcattggccatccaaattcctgccgtagtttttgcctggcataccggctggtcataccgctggagcggtttttatctacaggcaccgcgtgaaatcggcgcattgatgcaggcagtgggctatctggcgctctgctacggtttctggccgcagctggtcaaacagcgttgggtctaccggatttctcaggtcgggcgcatggcactgactcactatctgctgcaaacgttgatttgcacctttttcttcaatactctcggtttttatgagcatttcaaccgcttacagctggtggcgttagtgcctgcggtatgggctatcaacctggccgtgacgcgggtgtggctgcgttatttccgtcaggggccgatggagtggctatggcgcaaactgaccgctcaggcggcgggcgagtcacatcatggaacgcattgatagcctgaatgtgatgctgcgataaaagttgcaaaattgtatgtaaacgttttctgagctgtgacgtaattcacgctggtttgtcgtcaaagcgtttaggatagcggtcgtgcagagcaagccgatcgctacactaaaacaggaaaaccgtatgatcactgtactttctcttttgccagacttcttatcttctgcccggggttcatctcttttttgcttccgtcggcctctgttaacgaccagcggagcgacctatggttaccattcgtgatgtggccaaattggccggcgtttctgtcgccaccgtctccagggtattgaataatccagcaattgccagcaaagaggcgcgcgagcaggtgctcaaagcggtcaagacgttgggctatcgaccgaatgcgaacgcgcaggcgttggcaacccaaagtagcgataccatcggcgtagtggtcatggacgtctccgatcccttcttcggcgcgctggttaaggccgtcgataccgtcgcccagcagcacaacaaatacgttctgatcggcaacagttatcatcaggcggagaaagaacgtcatgccattgaagtgctgatccgccagcgttgtaacgcactgattgtccatgcaaaagcgttaggtgacgctgagttggctcagttcatggagcaggttccaggtatggtgctggttaaccgggtagtaagcggttacgaacatcgctgcgtctcgctcaataatgtggttggcgcagagatggcgaccaagttgttgatctctcaagggcatcagcgaatcggctatatcggctcaagccacggcattgccgatgaagaagagcgctttcagggatacgtcgccgcaatgcagcaggtacgtcatggcgaaaaggccccgtttgaaacctggcgtgcgtcgggttcacccgatttacagggcggcgaggcggcgatggttgaactgcttgggcgcaatctgcacctcagcgccgtgtttgcctacaacgattcgatggccgccggagcgcttgccgtattgaaagagaacggaattcgcgttcctcatgacttttcgttgatcggtttcgatgatattccgattgcgcgatataccagcccaaaactcaccaccgtgcgttatcccattatttcgatggcgacgctggcgaccgaattggcgcttcagggggcggcaaatcagctcactgcgggggtctcacactgctttatgccgacgctagtgaggcggcattctgtggcgccgtggcaaagtgtggcaccggtcactccctgagaatttattaggatgtaaccgttttcaatatgtgagaactttcacagtttattaacatcgcacctattatgattcattcgttttcaagatgattccgtctgtatcattttgaatgaatgacggtagcaatgaatattctgcctgtcgattctggcaatcaggcgacaggcaatgcagtagcaaaaaactaaaacagtgatgataagcaattccggaagatcttcgtcaaggaagacaggcatccagagaatcgacttctcataagagagcggtggacgccaaattctgtaccccctacataaaaaccggagataccaatgaataagaaggttttcaccctggctacactggctgcctgcatgatgtttggctctgttgcccatgccgcagacacccgtatcggcgtcactatttataaatacgatgacaactttatgtctggcctgcgcaaagatctcgagaaagatgcaaaagcggctccggacgttcaactgttgatgaatgactcacagaacgaccagtccaagcaaaacgatcaggttgacgtactgattgccaaaggcgtaaaagcgctggctatcaacctggttgaccccgctgctgctccggttgttatcgaaaaagcccgtgctgccggtattcctgtggtgttcttcaacaaagaaccttctcgtaaggcgctggacagctatgacaaggtctattatgtcggcaccgactccaaagaatctggcgttatccagggtgagctgattgccaaacactggaaagccaacccgtcatgggatctgaataaagacggcgtcattcagtatgtgttgttaaaaggcgaaccgggccacccggatgccgaagcgcgcaccacctacgttatcaaaacgctgaacgagaaagagggcatcaagacccagcaacttcagcttgataccgccatgtgggacaccgcacaggcgaaagacaagaccgacgcctggttctctggtcctaacgccaacaagattgaagtggtgatcgccaacaacgatgcgatggcgatgggtgcggttgaagccttgaaagcccacaacaaaaccaatattccggtattcggcgttgacgccttaccggaagcgttggctctggttaaatcgggtgcgatggccggtaccgtattgaacgatgcggaaaaccaggcaaaagcgacctttgatctggctaaaaatctggccgaaggcaaacctgcggcagacggcacaaagtggaaaattgttgataaagttgtgcgtgtcgcctatgtaccggttgataaagacaatctctctcagtttgtgaagtaattcgttcttcttgccgctctagcgcctttgctaaggcggcaatagtccagaattctttttgtttagatattgcagccaacacttttgacgtgaagaaacaaaaataagtcaaacggctaataagctaaaagcagtggcatgttttaagcaagttttacaaagcagtttgagtaaacctactttgcgttatgtcgcttaggtcagccgatcaggttatttctgaccggcaattttatcctttagccagatttcatttacttaggtagcgctatggccagtcttaatacggaacagccccgcgagtggctgctggaaatgagcggaattaataagtcatttccgggcgtaaaggcgttagacaatgtaaatttaaaagttcgtccacactccattcatgcattgatgggtgagaacggcgcgggtaaatctacattattaaaatgcctgtttggtatttacagtaaggactcagggaccattctttttcagggcaaggaagttaattttaaaagctcgaaagaagcattagagcagggcgtttcgatggtgcatcaggaattaaacctggtattgcagcgcaccgttatggataacatgtggctgggtcgttatccaacgaaaggcattttcgtcgatcagaacaaaatgtatcatgacaccaaggccatctttgatgagctggatattgatatcgatccacgcgagaaagttggtaagttatctgtttctcaaatgcagatgattgaaatagccaaagcattttcctacgatgcaaaaatagtcatcatggatgagccaacgtcttctttaaccgaaaaagaagttaatcatctgttcacgattattcgtaagctgaaagatagaggctgcggcattgtttatatttctcacaagatggaagagatcttccagctgtgtgatgaaattaccatcctgcgcgatggacaatggattattactcagccgctcgaagggctggacatggacaagataatctcgatgatggttggccgctctctaagccaacgcttccccgaccgccttaacaaaccgggtgaggttattctcgaggtacggaatctgacctctttgcgtcagccttcaattcgtgacatttcttttgatttgcataagggtgaaattctcggtatcgccgggctcgtaggcgccaagcgcaccgatattgtggaaacattatttggtattcgtgaaaagctacagggaaccattaagcttcacggtaaaaaaattaacaataatagtgcgaatgaagccattaatcatggctttgctctggtgacggaagagcgtcgttcaaccggtatttatgcttatctggatattggttttaactcgctgatttcgaatattcgtaactataagaataaaatcggtctgctggataataaccgtatgaaaagcgatacccaatgggttattgactccatgcgtgttaaaacacctgggcatagaaccaatattggttcgctttcaggcggtaatcagcagaaggttattattggtaggtggctattgacccagccagaaatactgatgttggatgaaccaacgcgcggtatcgacgtgggtgcaaaatttgaaatctatcagttaataacagagctggcaaagaaagagaaaggcattattattatctcttccgaaatgccagaattgttgggtattactgacagaatactggttatgagcaatggacaggtcgcgggtattgttgaaacaaaaagtacttcgcagaatgaaatattacgccttgcatccttgcacctctaatttctaagggttcttattatgaatgcgttaaataagaaaagcatgctcacttatcttaaagagggcgggatttacgttgtactgtttgtattattggccattattatttttcaggatcctactttcctgagcctgattaacctgagcaacattttgacccagtcttccgtgcgcgtcattatcgcactgggcgtggcggggctgattgtgacccagggtaccgacctttcagccggccgtcaggtgggtctggccgctgtggtagcggcaactatgctgcagggtatggacaacgtcaacaaggtgttcccgcatcttgacgtggtgccgattccgctggttattcttgccgtctgcctgattggcgcggtgattggtttggtcaacggcattattatcgcctacctcaacgtgacgccgtttataaccactttgggtaccatgattattgtttacggcattaactcgctgtattacgactacgtgggcgcttcgccgattgcgggttttgactcacacttctcgcatttcgcacaaggctttattagcctcggcggcttgaagctgtcctacatcaccttctacgcgattattgctatcgccttcgtttgggtcttgtggaataaaacgcgctttggcaaaaacatttttgccattggcggtaaccctgaagcggcgaaggtttcgggtgttaacgtaccgcttaacctgatcatgatctatgcgctgtccggtgtgttctatgccttcggcggtatgctcgaggcggggcgtatcggcagtgcaaccaataacctcggctttatgtatgagctggacgccatcgcggcctgcgtggtcggcggcgtgtcgtttgcgggcggggtcggttctgtggctggcgtggtgaccggtgtgcttatctttaccgtcatcaactatggcctgacctatatcggcgtgaacccttactggcagtacattatcaaaggcggcatcatcatcttcgccgttgcgctcgactcattgaagtatgccaagaagaagtaagctttagcttacagttttacgcacccgaaacgggtacgttacagaagccctttaacggcagaacacaggatttgtgttctgcttttttttgcctgctatttaccggctgcggctggaggcgcgacggcgggggcgttttttctgctgctttcttctcggcctttttctcggcggctaactgatgttgcaatgcgacaacctgttctggggtgacggcaggatagccctgcgcatcgtcaggaatatgatgcacggctgggataggaataagagggccgaggaagcgaggctggcgatgcaaaatatacagatcattcagcgcgcccagacgggcaaagatttcacgtacgcgcactgtcagaatatctttaggtgaaggcacggcaaaacattgcgcctgaattcccatgtgcagggcgataaacagcgcccgctcgcagtggaaacgctgggtaataatcagaaagtcgttggtgtcgaagactttgcgggtgcgcacaatcgaatccagcgtgcggaatcctgcgtagtcgagcacgatgtcgctcgaagggatccccgcggccatcaggtcgcgacgcatggtcatcggttcgttatagctctgcagtgcgttatcgccgctgagcagcagatattttaccttgccgctgttgtaagcgttaatcgccccttggatgcggtagagataatactgattgataacgccggtgcggtaatatttggcggtacccaatacgacgccgacctggcgatgcggcagtgcctgcacttcatcgtagatatagtctttggtcttccagctaatccatcggtccagcccaatagcgacaaccagcatgaatactacgatgctgataaagcctactattagccgcttaatcatggaattgcctttaagtctgtgaagggaggcgaagggttcaaggctactttacctgcccggccgacgcaataagcgaaggcttagaacatgtcacatgctccttttttaaacgggatgctgggtatttggcgcggtagccgccttggcttcagttaatcacccgaatcactgacctgagtaagctcatcgggttttttaaatttaccgccttgctaccgcacctacgactcagccgttaatgcggcaacgaggtaatctgcggcttagaacgacgtgcgcttataggtacggtactgcggtatccagaagttgtgctcaatggctttggacagcgcgtcttcagtggtgacctgcgccacgccttctacctgcgccgctttgccgacttccattgcgatacattttgatacgccctgaatgtcgttcacgtctggcaacagtgagcctacgccatcggtcgccagcggtgagcagtctgccagtgcgcggctggctgccatcagcatgccgtctgttacctgtttggccccagaggcgatgaccgcaagcccaatacccgggaagatataggagttgttgcactgggcaatagggtagaccttgtccttgtagctgacaggcgcgaacggactgccggtagcgaccagcgcggccccgtcggtccagttgatgatatcggccggatgggcctcaacgcgtgacgttggattggtcagcggcatcacgataggacggtcgcagtgggcgtgcatctcgcgaataatttcttcagtgaacaggcctggctggccggagacgccgatgagcaccgtcggtttcgcgtggcgtaccacctcaagcagggagatattgtcgctgtcgacgtcccagtccttaagattctcgctgttctgcaccagctggctctggaagtcgagcaggttggtcagtttgtcggtcagcaggccaaagcggtcaaccataaagatgcgggcgcgggcttctgcttcgctcaggccttcagatttcatctgcgccactatctgttcggcgatgccgcagcccgcagaacctgcaccgaggaaggtcacggtctggtcacgtagacgactgcccgccgcgcgactggcggccaacaggctgccgacggtgaccgcagcggtcccctggatgtcgtcattaaaacagcacagctcttcgcgataacggttgagcagcggcatggcgttcttctgcgcgaagtcttcaaactgcaacagtacgttcgggaagcgaactttcaccgcctcaatgaactgatcgacgaacgcatagtattcgtcaccggtgatgcgaggatgacgccatcccatgtacagcgggtcattcaacagctgctgattgttggtgcctgcgtcaagcaccacgggcagcgtgtacgccgggctaatgccgccacaggcggtatacagtgacagtttcccgatagggatccccatcccaccgatgccctggtcacccagtccaagaatacgctcaccgtcggtaaccacgatcaccttgacgtgttgcttggtggcgttttgcagcatgtcgtcgatgtgttcacggttcggataagagatgaacaggccgcgcgcgcgacgataaatctcggagaagtgctcacaggcagcgcccacggtcggagtataaatcaccggcatcatctcgctcagatgctcgtcgatcaaacggtagaacagggtttcgttggtgtcctgaatgttgcgcaggtagatatgcttatcgatatcggttttgaagtcctgaaactggcgataggcgcgagcggcctgttcttcgatactttcaaccgtttccggcagcaggccgtgaaggttgaagctggcgcgctcttcctggctaaaggcgctacctttgtttaataacggaaactcaagcaggattgggccggcatgagggatatagagtgggcgtttactttcgtattcaagttccattgatttactcttcaggtctcggaaaggcgggaaaggcaaagttaataaagcgcgatggtcacatcgatttttaacagcgttgtgtgactcaaggactttagcagaggtgaaagggccaactcaattatttagcccggaatggggagaaatgttgaaaattagttaatgaatagttgaatcgacagggccatctgacaatggccctgcattatggggcgtgttgatttataaagtaaatcagagctggacgtgctgcagttgatcgcagcccagcgccttaagcgttgcgcgggttgcgtcaaactggctaacgagcggatctttcttctccaccagcgcagcgcggcgaatcgtcaggcagctctcgcccgacaaattcagtaccaccagtgccgcctgtagcggtggcaggctcgggttgaatgcggcgttctcggcgtagcggccggtataaatttttccgctggcactctctaatgccacgccgctgtgcgactggctgtaaggggcgtggctctggttgcaggccgacaacgcctgttctaccagtgcatcgccttcggcattgtgataaccgtggtcgacgctgtccatgagcagggtggcaatctcaaggtcgcgcgggccgaatgagtagggaagatagtcacccagcgtagccacggcgcggtctggcagatggatggccagttcggtaccgctgttgagttcattcataaactgacggcagtgcccgcagggggtgtagttgaccgtaatcgaggccagctgggcttcaccacgcatccaggcgtgggtaacggcagactgctctgcgtgcaccgtttgctgcattgatgcgccacgaaactccatgttggcaccaaagtacagattgccgctcacgccacgtgcgactgcgccgacgtagaagtttgagataggggcaatcgagcaggctgcggccagaggaagcagggcaaaggccagcgcggcgtcgtccagtccagtttgtgatttaagttggttgacctgtgcggcggtaaacatcgcggggaagtcgtcatggcggagtatcggctcaagggcagattgcagtggagcgggcaggccagcataagcatcgatgaaacgtgtgtgcatggagacatccttggtagcattttggcaggctattctaagacgcttttagtgtttcttgtgtgacaagtatcactatatttatgaaattgatgcaataacttggcaaattgcgagatgtctcgcaggttttggtcatcaaatggagggcgagtgtctaatgaaaatcatcgagagcggtgttcgcgacgtggcgacgggaaaaaatgtcacgattgttatgccatccaatatttatggatgcaccctggaggatgatgtcttcgtcggcccgtttgtcgaaattcagaaaggatgcgtcatcggtaaaggaagccgtgtgcagtcgcatacgtttatctgtgaaaatgtcatcctcggcgagtactgctttattggccacaacgtgagctttgccaatgatttgtttaaaggcggtgcacccgatcccgatgccgggaattggattagcatcctcattggaaataacgtcactattggcagtggggcgactatcctcacaccgtccatttgcgcgggcgcagtgattggcgcaggcagtgtggtagtgaaacctataaccgtgaaaggcacctatgcaggaaatcctgcgcgattgataagggcactataagagataaaaaacccgaagataaaaatatcttcgggttttttatgatgccaggaaatgcattctggaagcttgactcagtttcttctttcgaaagccagcgcgcggcgttctatcaggcgcatcatcagcgtcagcagaccgtttacgcagaggtaaaccacgcccgccgcgccaaacaccatcacgtcataggtacgaccatacatctgctggctgtgtcccatgacgtccatcagagtgatggtgtaggcgagtgaggtacttttgaacaccagcaccacttcgttcgagtaagacgacagtgctcgtttgaacgcaaacggcagcagaatacgcagcgactgcgcctttgacatgcccagcgcctggcaagattcccattgaccgcccggaattgccctgaccgcaccggcaaaaagctgggtggtgtaggccgcgctgttcagcgccagggcaaacatcgcgcaaagccatggctgggagagcatttcccacaaccacggaatgttgcgaatagacggaaactgccccggaccgtagtaaatcaggaagatctgcaccagcaacggcgtaccggtgaacagcgtgatatagccgcgtaccagaggattcagtaccggtaccttaagcgtcaagataaccgtaaacagcaacgacagcagcagcgcgacaatcaatgccgccacggtcagcgtcaggctggtatgcaggcctttcaatacttcaggcaaatagtcccacatcaggaagcactccgttcaaagcgggtggtacggagttcgatgcgtttaatgacgaactgactgaacagggtaacgatcagatagatagccgccgccgtcacataccaggtgaagggctgctgggtgcgcgtcgcgatgctcttagtttgcagcatcagatcgttgacgctgatgagcgacaccagcgcggtatccttgagcaagaccagccattggttgccgaggccgggcagggcgtggcgccacatctgcggcataatcagccggaagaagatagccgtcttacgcatgccgagcgcctgacccgactcccattgtccctgaggaaccgctttcagcgcgccgcgcagcgtctgtgacgcataggcggaatacagcaacgacagtgcaatcacaccgcagacaaaggggctgacctcgaaattatcgagtggcagtttaaccgggatctggaacagataaagattgaggtcaaaaccgtcggacagcgtcagcagcagctgcgaagagccgaaataaataaaaagtaccaccagaatttccggcaggccgcgcaaaatcgtcacccaggcggtgcccagccagctcagcggtttccagggagaagactcccagacggcaaacagcatcgccaggaacaggcccaggatcagtgcacaaatggcaaggccgacggtcatcccggcggcgcttagcagaggttggagttcaatcatcgatagtgagattattgcgtgaaccatttggtgtacaacgctttgtaagtcccgtcttgtctgactttcgcaagtgcgtcgttcattttacccagcagctcggtgttgttcttacgtaccgcgatacccacaccgttgccgaagtaggtcttgtcggtaacaggctcgcccaaggtgctgagcgttgggttcttggtgatgaattcatgcactacggcagtgtccccgaatacggcatcgatacggccatttttcaggtcgagcacggcattctgatagctgtcgtaaggcaccgcggtgatctcaggatgtttgtcctgcaggaaacgctggtgcgtggtgccgttttgaatacctacgcgcttgcctttcagcgcagccaggtcagcaaatttgcctttctgtgcgaagaaggtcgcggtgttgtcatagtaggcgttggtgaaggaaacctgcttctgacgctcggcggtgatgtccatacccgagataaccgcgtcgatacggcggaatttcaggctagggatcaggctgtcgaacgactgattagtaaaggtacaggtcgcctgcatttgtttacacatggcgttggccagatcgatatcgaagccttggatcttgttgtttgaatcaacgaattcaaacggagcataacccgcttcggtgccgaaattaatggtctctgccgcgctagcagacaggctgacaccggctaaaacagccgcaataatgagctttttcattgcaaactactccatatgtaatctaaaaggggcaaatcagtgtgataaatagctggcaaactcgcgggtctgcggctgcgcgaagcagttgccatcaccctgttcgatgatgcggccattttccatatacaccacgcgtgttgccgttttacgggcgacctctacttcgtgggtcacaataacctgcgtaatgccggtatcggccagctcacgaataatgctgacgatttgtgcggtaatttcagggtcaagcgcggccgtcggttcatcaaacagcaggacctgaggttccatcatcagcgcacgggcaatcgccacacgctgttgctgcccaccggacagatgtaatggataacgctgggcgaaatctttcaggcgcaggcgggtcaagagcttttcggcgcgcgccatcgcggcctctttgcttaaaccgagtacgcgacacggtgcctcgagcaggttatccagcactgtgcgatgtggccacagattgtattgctggaataccataccgacgttctgacgcagttcacggatagccttttcgtccggcttcttttggaagtcgaattgattgcccgcaatttgcaggttgcctgagcgcggcatttccaacaggttcagaacccgcagaagtgagcttttacccgcgccgcttggccccagaagcaccaaggtttcgcccgcaggacagtcaagcgtaatgtcaaagagtgcctggtggactccgtagaagcagttaatactgtttagttgaatactcatgcgcaaatactgaatagccattaatgccgcagagggtaccctctgtagcatagttatgcaacaaaggagggttaaaatttatttgtgtgcaacctgaatcataaacttagcataagatatcgttaacgaggtgttacagctggttatttttgtatacacctcagacgcattacactgcaaatgcaaaccaaaatataacctgggaaaggatggaaatgaggcgtttttcaatacgttggcgtgaggccatcattcttggcagcctgatgctgctggcgggatgccagtcatcctcttccgtaacgccgcatcgcgactatgtgctggaaaaatcacgtcaagcgcagggcgcggaccagcgtattcgttttctggtgattcattataccgccgaagattttcataccgcgttgaatacgctgaccgacgagcacgtgagcgcccactatcttattcctgcgcaaccgccgatcgttaacggccagcccgttgcctggcagctggtgcctgagtcgatgcgtgcctggcacgcgggcgagagcggctggcgcggcagaaccaatattaacgatacctcgataggcatcgagcttgagaataaaggctttacccagcgcctgctcgagcgtcagttctatccttaccctgcgttacaggtggcactggtcacctcgctgagccgggacatcgtcagacgctatcagatacagccgcaggacgtggttgctcatagcgatattgcgccacagcgcaaagaagatcccggtccgctgttcccgtggcagcagctggcggagaagggcgtcggtgcctggccgcaggcgtggcgcgtgaaggcatttttgcacggacgtgacccgcagcagtcggtgccgatggcgggattactggataaactggcgcgctatgggtatccagtgacgcaagatatgacgccgcgtcagcagcgtcgggtggtagcggcgtttcagatgcacttcaggcagcgtgactatcgcggaaatccggatgcggagagtgaagccatagcggatgccctgttacaacagtatccgtcggcggcaaattaattcgggtgactgataataccctgcttctgttgcagttttccgtggtctctgagccacagcgcggtgcgctggatgccttcgtcgagtgagacaatcgggtgatagcctaactcggtctcggcaagttgggtgtccagagtgacgtcgaagttgagtttggcgacgctgtagtgggtcagcatcggctcgcggtgctgcttacgtcccagtttctccatcccgcgcgccatcatgtccagcaacggataaggcacggtgcggatgcgatatttcacgtctagcccggccatcaactgctcgataatcgtcttcagcggacgcggctgcatgttggtgatgttgtaggcgcggcctgactcatgattctgactctcggtcgccagccacatcgcgtgcgccacgttctcgacgtaggtcatgtccaccagcgcctctccgccgcgcggcagcatcagggtgccatatttaatcatttgtagtaggcgcggcagcagcacgttgtcgtgcgggccgaaaatcccctgcgggcgcaggatagtgaaatgcgtctgcggattcgacagcgccagcgtggtgatcacctgttcggcagccgccttgctgcgggcaaactgattggcaaaccgcgcagggcggaagtcttctttaatattgcgatgatggtgaaagtcgaaataaatcgccggcgaggagagatggataaaattctctacgccataggcggcggcccattcgccgaggcgacgcgtcgcacggacgttcgccagttcgaaagcctgctcgctccccacggcgcgctcagccccgagcagtgccatagcgtatcgacgtctgccagcagcacttttgcctctgaggaaaccagattggtcaaatcggcatgaataaattccgcacccagtttttccagtaatggacccattgccgcattgcggccggttgccctgactttaatgccttttctccgcagatattccactgcgttgcggcctggaccactggttgcaccggtaaccaataccttcataaatatccgaattccgtgaaaatgtcgttgcagtcggtctctaaacagacccctggcaaatagggggccattctttctcgaatttcaacgctatgcaatgagaaacaggataacttgtgacgctggccggtgcgtttgcctgcaaaatagaccggccgctttttcagtgaccgcgccggtctttttgccgcgccagactggctattcttttcgccatgccgcgaaaaaggaaaaggtgcgcaggcatcattgcataccagtaacacagaccgcgcgcgccggccggatgccaccaggcgctgatgtcgagactgcgtctttcgccgtggtctttcagcgtaaacgtcagcctgcccagccccggagccttcatgccgaacaatagggtcagtgatttttctgataccttgctgataaccttccagccatccacgttgtccccgaccgaaagtgtagccttcgcgggccgacccggtggtattttgttgcctaacagccgatcgattctttgatggaaacgccacagccctggagcaaagaagaacccttcctcaccgcccagctgttgaataacccaccacagaccgttgagtgacgccgaggtctcgagacggaatcccacctgtttggcatagaaaccgtaacccttgcgccagcggcggtgtgcgtccggatcattgccccactcaggggtgttcaaaacgctttcctcctcttgcgccagcgccagattaatcgcctcgtcaattgaggtcagcggctgaggtagaagctggcgcagggcatcgctgtcggagggcaggtcctgcttcaggccttgaatcagcgcccgaaccagcggcgttggcaccgacgtcaacaggccgagaaacgccagcgtcagcagctgcgtgggcagagggatcggcaccagccagcggcgtttgccgctcagcgcgataaaacgctccatcagctgacgatagctcatgtattccggtccggcggcgtcaaaaatacgatgcgcgacgcacggatgctcgataagcccgttgaggtagtagagcaggtcgttgaggcctatcggggacgagtgttttcttacccatcttggcggagtcaggaccggcaggttgtaaatcatgtcgcgcatcacctcaaatgccgcagcgcccgggccaatgacgatgcccgcccgcagctcggtgaccggaatagggcccagacggaacaggtcaccggtcaacttgcgtgcctgcaaatgcggtgaaaagggcttctccggctgcattgaaccgaggtagataacgtgtttgatcgaggagtctttgagtgccagcagggtgttctgcgccgcttgacgctctttctcgaacagatcctcgtcatcactcatggcgtgtaccagataaatcagcacgtcagcgcctgcaaacgcatcgcgcaggctggcattgtggtatacgtcggcaaagcagcagcgcacgcccggccatttttgcgcgactaaccagtctcggcgtcttgcggcagcggtaaccttataaccctgctgagtcaaataggggacaaggtgttggccgatgtagccgctggcgccgagaacgacgacgcgggtctctgcgttgagtgttggcatcttccattttgctctttcagtgtgaagaaaagcgcccgcagacggagagcgacgtccctgcttccattcggtctgcgggcagcgtattacgcctgattagtcagaaaacgttgccataaatcgacaaccttctgtaaatcctgacggctgatattgatgtgagtgatgatacgggtcagcggacctgacgagattatcacgccgtgttcgcgcatccatgggcccagcttcgccgcctgttccgctgactgacgcacatagagaatattggtctgcgctccggggacggcgatctccagcccaatgccgcgcagctgctgctcgagccatttggcattatcgtggtcttctttcaggcgctggacgttattttccaacgcatagattcccgccgccgccagaatccccgactgacgcatgccgccgccggtcatttttcgccagcgattggcgcgatgaatgtactctttactgcccaccagcaaggagcctacgggcgcaccgagccctttcgacaggcagagggtcagggtgtcgcaatagcgggtaatctcactcagcggcacgtcgagtgcgacggcggcattcatgatgcgcgcgccatcgatatgtaacgccagccctttttcacgcgtgaattcaaaggcctttttcagatactccagcggcaataccttgccactgtgggtgttttctaggcttagcaggcgggtacgtgcgaagtgaatgtcgtcaattttgatagctgctgcgactttgtcgaggggaagggatccgtcgtcggccatgtccagcggctgtggctgaatgctgccgagtaccgctgcgcctccggcctcatacatatagttgtgtgctttttggccaacgatgtattcatcaccgcgctggcagtgggtcagcagggccaccaggttggcctgagtgccggtggggagaaacagggcggcctctttgcctgtcaactcacagatcagtgcctgaagggcgttgacggtcgggtcatcgccatacacatcatcgcctacctcggcctgatacatggcctgacgcatagcctcatttgggcgcgtaacggtgtcactgcgtaaatcgatcaacgttgcttcctctcactcatggcctgaactttggggggtgaaaaggggcgatatacgcccctcggtggaatattctttccactatatacctataaatatgcgcaatgcggaagggttttcttcagcgtaaccagttggttttagccaattcaaccacttcatcgccgcgaccattaataatcgcgcgcagcatgtagaggctaaagcccttggcctgctccattttgatctgcggcggcatcgccagctcttccttggcggtgatgacatcaatcagcactggaccctcgtgcgcgaaggcctcttgcagcgcggcattaatctgcgaagccttttcgacacgaatacctttaataccggaggcctcggcaatagcagcgaaattcgggttctccagctcggtgccgtcggtcagataaccgcctgacttcatctccattgccacgaatcccagcgagctgttgttgaaaatgaccagcttgaccggcagtttgtgctgggcgatggagaggaagtctcccatcagcatggcgaatccgccgtcgccgcacatcgccaccacctgtcgatttctgtcgatagcctgcgcgccgatagcctgtggcatggcgttggccattgatccgtgattgaaggagcccagcaggcggcgtctgccgttcattttaagatagcggcaggcccagacggttggcgtgccaacgtcgcaggtaaatatcgcgtcatcggcggcatactcgctaatctgtttagccaggtactgtgggtgaatcggctgcttgtcgttgagggtcgccaggtcgtcaagccctttgcgcgcttcttgatagtgttttagcgccttatccagaaaactggcgtcggttttagccaccaggccgggcagcagggcggcgagcgtagatttcacgtctcccaccagggcgacatcaacgtggcagtgtgagccgatgctgcccggattgatatcaatctgaatgattttggcatcggtcgggtagaaggcgcgatacgggaactgagtgccgagcaggaccagcgtgtcggcgttcatcatggcgtgataaccggaagagaaaccgatgagaccggtcatgccgacgtcataagggttgtcccattcgacgtattccttcccgcgtaaggcatgcaccaccggcgctttcagcgtttcggcaagcttgactacctcctgatgggcacccgcacagccgctgccgcacatgagcgtaatattggaggagccgtttagcagttcggcgagctttgcaatctctgaaccctgcggttggactaccggcggcagcggttgataccactgcgtgctggcctcttcaggcgcgggcttgagggcgacgtcgcccggcagcacgataaccgagacgcccttgtcgagaatcgctttacgcatcgcgatggcgagcacctgaggcaactgctccgggttacttattagctcacagtaatggctgcattcgcgaaagatatcggttgggtgtgtttcctgaaaatatccactgcctatctcgctggagggaatatgcgcagcgatggcaaccaccggcacgcggttgcgatgacagtcgtaaagcccgttaatcagatgcagattgcccggtccgcacgaaccggcgcagaccgcaagcttgccggtaatctgcgcctcggcaccggcggcgaaggccgcgacctcttcgtggcgggtgccaatccactcgatagtgcccatacggttaaggctgtcgctcaggccgttaagcgagtcgccggtcacgccccaaattctttttacgccagcttcttcgagcgttttcgcgataaatgccgctacggtttgtttcatgaatccctccggtgtttttagatttttcaagccgctgagaaattttctgcggtatcaataaatttaaaacttctggaggtaagcatagacgataagattttatcggcgtttcaggatgaaaataccgccatcaggacgggggcgaccaggctgagcacaaacccatgcaccacggcggcgggaaccatgtccagcccgccgctgcgctgaagcactggcagggtgaaatccatcgaggtcgcaccgcacaggcccaaagccgaggagcggctgctgcgcaccagcgtggggatgagcataatcgcgcacagctcgcgcgccaggtcgttaaagaaggccgcgctgccaatcaccggtccgaaagcatcggtcaatacaatgccggagagcgaataccagccgtagccggaggccatcgccagcccggttttcagcggtaatcccaacagcagtgcagcgagcagtccgccgccgagcgacgttgcgccgaccacggttgccaccatcattccgcggcgattaaggattatctgacgcagcgtcaggctgctattgcccagctggatgccgacaatcaccagcagaaagatcagcgccgcctcgctggcttcgctggcataggtgagccagtgccactgcgttagacccagcagaaagccgccgaccacgacgccacacaggcgcagtgagtcgagcgccatgccgagccgagagggcagtttttcctgacgaaactgggttttccacggcttacgacgttcgagcagccacagggcaatcaaattgacggcaaaaatacagacgaaaaaaaccgccgtgtatttgaaaatcatcagtaaattggcgcttaggttatcgagaaatgccaggctgacgcccatgataaaaaggatcacatacaccatggcgctcagcagcctgtcgaccgtgtgcagcaggcggcggtttttaaccggaatgaggtaaccgaggattagcgggactagaataattaacaagccagagtacatttttaacagagtccattcgttattgtgataattcgaagtattgtaataatggtaagcattgtaacagcgcccttttttatagccatgctcaacgcgggaaccggaccagaaaatagtcgcacgggaggtgccaatgtatcttgagcatatcgatattgtcggttttcgggggattaaccgtctctcgctgaccttgacccagccagaccggcgtggggtggcgctggactcgctccatgaagagcgtggacaggccaatttgggcactattaacactaacaccgttctgttgggggaaaatgcgtggggtaaatcgagcctgcttgatgccctgacgctgttgttatcgccagagccggagctttactgttttcaggaacaggattttcatttcccggccggtgaacagcaggaaaaacagcgttatcttcacgtcgtcttcaccttctgtgagaaccagccaggcaatcacatgtccccgcgattcaacccactgtcaccgctctgggtgcgctgcgaagatcgtcttaatcgcatctattatcggcttgaaggtgagatggacaacgacggcagtgtggcgacgtggcgatcgtttctggccgccaacggggaaccgctggcgctcagcaccattgatcctctggccaaagtgttgatcaaactccatcctgttttgcgccttcgcgatgcgcgttttgttcgacggatccgcaaggaagatcttgcgccgcagttgcagcaggatgccggtaaaatggccaagcaactcgacgaactgacgcgcagcctgatccataatccgcaggcgttgaccaatgccgaactgcggcaaggtctggcggcgatgcaacagctgctcgagcactactttgggatgaacagcattacgcagggcggaaattctgccgtcgacgagcgtaatcgaagccgtcagtcctggcagcaaaagcgccacggcagggcggagagccgtcaggcatggcgatcgctgaataacattaaccagatgattgctgaacctaacagtcgtagtatgcgcgtgatgctgctggcgatgttttcgacgctgctccaggccaaggggtcggttgcgctgcatcccgatgcgcgcccactgctgctgattgaggacccggaaacgcgcctgcatccgatcatgctttctgtggcgtgggggctgctcgaacaacttcccctacagcgcatcactaccactaactcgggcgacctgctgtcgctggtaccggtcgagcagatatgcagattggtgagggagtcgggcaaggtcgcggcatacagcattgggccacagggcatgagctctgaagacagtcgccgcatcgcgtttcatatccgctatagccgtccttcgtcgctgtttgcacgctgctggctgctggtggagggggaaaccgaggtctggctgttgaaccagttggcacgccagtgtggctataattttgagtcggaaggcatcaaggtgatcgagtttgcacaaagcgggcttaagccgctgctgcgttttgctcgtcagatggggattgagtggcacgtgctggtggacggcgacgaagcgggcagaaaatacgccgcaacggtggccagtctggtagagaatcacgacgatattctgcgcgaccgcttgacggcattgccagcgctggacattgaaaactatctctatcgcaatggttttgaagacgtctatcgtcgcgcggcggggacgccggagcacgctcctatttccgcacgtcatatcatcgaaaaggcggtgcaccgcagctcgaaaccggatttagccatcgaggtagcgatgtcggcgtcggggcggggtaacagtgcggtaccgtcggtgttaaagcagatgttttcgcgagtggcatggctcgcccgtgggcgtgccgactaatagccttcgtccttggcgctgccacggcgttggctgcgcgcgcttaccccagttactgacttgtgtcagctcctggggatgcgcttacttgccgccttgttgcagcaccaatgacttggctatggccttcttgcctggcgctgccacggcgttggctgcgcgcttaccccagttactgacttgtgtcagctcctgaggatgcgcttattacgcgaatttaccgcggatttgggtctccatttcgtcgagcaactggtagcggcgtcgatattcggcgcgctttttgctagcgatttcgtccagcgatttatggctcacctgcggtgggaaatggaaataaccctcgggatgacgatgtgcgcctagcgtctcccagaaggcgtcataatcggcaaagacaaactgtttacgtttgttatagcgcgggctttcgtagatatgagtttgattccccacggcaagcacctgcgacatatttagtttctcggcaataagcagcacggcttccattaatatccgttttggaaacaggccatggcaggctttggtcgcagtttgaatttgctgatgttcgacctgttggccgggtccctgcaatgccccgataaataacgttgactgtttcttataatcaatcagtgcaaaggtaatattcgccagcgggatacccatttcattattaaacataagggtaacttccccttctttgtctaaatgatgattagcattcatgctgatagaataagcattgtcgtctttgccaattatcgttgccagcgtcagagaatctttacccagatgcccaatctgcatcgtaatcggcatgcgatcgcgcatatagcggtagtgatcgcgcaaacctttgacgtgctgttcacgcgtcatattcaccgccagataagggcgatggaccttgcagggcagagtaggctgtgccatcaagatctcgtctttaagcggatgagatgcgatgtcattcattaatttaagggtcgaacgtggataaaccatgcagcgcgccagaaactttatgcgatagaaaggtttgctccacatcttacccggaataaattgcccggtaattaatgaggatattagtgcgacgccagactgtgctctaacgcgagaagccggaaagcttaagattgacatgttcggtaaccaataaatgatattggaaccatttgaacagctagattttaaaccagataacaacggcactatgggctaaaatatatcttagcggattgtttatagatggtttacgttgaaacggattagtctgaatgacgagaatattaaacaaaaaataaatttttttgatggcaaagcttgaacctgcgaatgttatcccccataaataaaataccagccaatgagtgactggtattttataaagtttgcaggattgtctgcggttatcacccggggttgagtggggtcgttaggcgaccacttcagtttccaatggaatgataatgcttgcatggtttcctttggggccttcatgaacgtcgaaactgacctgctgtccagctttgagtgttcggtaaccctccattttaatcgtggagtagtgcgcgaagatatcttcacctccgcccaaaggacaaatgaaaccaaagcccttggcattattgaaccatttaacagtacccgtctccatgctctcacatccctctcatgactatggtcgaagtaatagttaaagagataaagcctgaatttacgcgtgatgatgctgaaaaatacgcgaaaaaggggatgaataacagctcatccggcttataaatttacactctagtgtattactcttggacgtcaagatatggctatttgtctaacgctagcagttcatcaaagtttgaagcaggtaacgatattgagattttttaggcaaattttgcgtcgatcgggcagaaaaaattcctattttatgtccttcggcaaggatgactaaaaaatgataaaatggttggagtaatctagtgaccatgatgagaggcgaggttaaccctttcggcatgtgtcgaatcaaccttatccaacagatatcaaatgtaaaggtagtggacaggcgatgggcgacaatcaaagttggcaaaatttcgaacatttggcggcagacaaacaaaaggatgagctaaaaccgccatctatgtataaagttatattaaacaacgacgattacacaccaatggaatttgtgattgacgtactgcaaaagttcttttcttatgatattgaacgtgcaacgcaactgatgcttactgtgcactataagggcaaagccgtatgcggcgtttacaccgcagaagtggccgaaaccaaagttgcacatgtgaatagctacgctaaggagaacgagcatccgttgctgtgtacgctggaaaaagcctgattaaggcaatctatttgggaggtgcctatgctcaatcaagaacttgaactcagtctcaatatggctttcgcaagagcccgcgagcaccggcatgagtttatgaccgtcgagcacctgctgttggcgttgcttagcaaccctgcagctcgtgaagcgcttgaggcctgtacggtcgatttagtggccttacgtcaggaattggaagccttcatcgaacagaccacacccactttacccgccagtgaagaagagcgtgatacccagcctacgttgagtttccaacgtgtgctacagcgcgccgttttccatgtgcagtcttcaggccgaagtgaagtttccggcgctaacgtgctggttgccatctttagtgaacaggaatctcaggctgcttatctgttgcgtaagcacgatgtcagccgccttgacgtggtgaattttatctcccacggtacgcgtaaagacgaagcgagccaggctccgaacaatgcggagaacccggttaacgaagagcagtcggcaggggaagatcgtatggagaacttcaccacaaatcttaaccagttggcgcgcgttggtggaatcgacccgctgattggccgtgataaagaactggaacgcgctattcaggtgctgtgccgtcgccgcaaaaacaacccgctgctggtggggaatccggcgtaggtaaaacggcaattgccgaaggccttgcatggcgtatcgaacagggtgacgtgccggaagtcatggctgactgtacgctctactctttggatatcggttcactgctcgcaggaaccaaataccgtggcgatttcgaaaaacgcttcaaatcgttgctgaaacagcttgaacaggacaagaacagcattctgttcatcgatgagatccacacgatcatcggtgcgggcgctgcgtccggtgggcaggttgatgcggctaacttgatcaaaccgctgctttccagcggtaagatccgcgtaattggttcaacgacttatcaggagttcagcagtatctttgagaaggatcgcgcgctggcacgccgtttccagaaaatcgatattaccgaaccttcacctgaagagacgattcagataatcaacggtctgaaaaccaaatacgaagcgcatcacgacgtacgttataccgctaaagcggtgcgtgctgcggttgagctgtcggttaaatacatcaacgatcgtcatctgcctgacaaggcgattgacgtgattgacgaagctggcgcgcgtgcccgactgatgccggtgagcaagcgcaagaaaaccgtcaacgtcagcgatattgaaagcgtggttgcccgtattgcccgtattccagagaaaaccgtgtcagctaccgaccgtgacgtgctgaaaaacctcggcgatcgcctgaaaatgctggtattcggacaggatactgcggttgaagtgctgaccgaagctatcaagatgagccgtgcgggtctgagccaggaccgcaagcctgtcgggtccttcctgttcgcgggccaaccggcgtcgggaaaaccgaggttacggtgcagctggcgaaagcgctggatatcgagctgctgcgtttcgatatgtcggaatacatggagcgtcacaccgtgagtcgtctgatcggtgcacctccaggatacgttggtttcgatcagggcggtctgttgaccgatgcggttattaagcatcctcacgccgtcgtgctgctcgatgaaatcgagaaagcgcaccccgatgtctttaacctgctgttgcaggtcatggataacgggacactgaccgacaacaacggccgtaaagcagacttccgcaacgtgatactggtgatgaccactaacgccggtgtgcgtgaaacagagcgtaaatcgattggtcttatccatcaggacaacagtcctgacgcaatggaagagattaagaaagtgtttacccctgagttccgtaaccgtctggacaacgtgatttggtttaatcacctgtctcctgaggttatccagcaggttgtcgacaagttcatcgtcgaactgcaggcacagctggatgcaaaaggggtgtcgcttgaagttagcgatgaagctcgcgactggttgtctgttaaaggctatgaccgcgcgatgggggctcgtccaatgacgcgtatcgttcaggaaaacctgaagaaaccgttggctaatgaactgctgtttggttcactggttgacgggggatcggtctctgtggcccttgataaatcggccgacaagctgacctatcactttatgagtgcgcagaaaatcaaggaagagggcgcggtgcactaagcaacgttgtctgaagctgtaaaatgaaaaaaggcgatggaaacatcgccttttttacgcccggctttcaccggattgcggaaaccacaaaacgccctcgccaacattcattgctgaaagtgggaagagcgaaatggggcaacctcaggtatcgcgagataaatcagcgatgagtgagcctatcagcggctacggaagacaatgcggcctttgctcaggtcgtacggggtcagctctacagtgactttgtcgcccgtcaggatgcggatgtagttcttgcgcattttaccggagatgtgtgcggtgaccacgtgtccgttttctaattccacgcggaacatggtgtttggcaacgtatccaatacggtgccctgcatttcaatgttgtcttctttggccatcgagtcctctaggtgttactaccatagtttttaaccggcaagataatgccgaaaaacccacattatgtaaagaattgttggcgttttccgcactcattccctattcctttaggagggatggcaaatcaacgtcatgtgggggtaagtcttgtggcaaccagcatcccggcgtcaactgttgttgggaaagcctggataactgctgcaaaaattggcggcgtgggatctctctcgcacccagcgacgcagtgtgagggttgagaacctgacagtcaatcagttctccgccattacgggtaaaatattggcaaaaagtcattattgcgcacttggaagcgttcaaacggcggctaaacatcgactctccgcaaaataatccaccgaccgcaacgccgtacattccgcccaccagttcatcgcccgaccacacctctatggagtgcgcctgtcccgctttatgcagttgcagatagccttctttgaccagcggcccaatccatgtcccttcgcttcgctcttcggcgcaggccgcaataacctgttcgaacgcatggttcagcgtataacgatactcggtctggcgaagaaaacgacgcaggctgcggctgatatggcgctcttctggaaacaatactgcacgcgggtccggggaccaccagagaatagcctcacccggctcgaaccagggaaacacaccgctaaagtaggccgacagcaggcgagtaggggttaaatcgccgcctatcgccaacaggccgtttggctgacgcagggcggtttccgggctgggaaagccgacggtattgggtgagagctgcaccaaacgcataaaattcctaatcggaggggagccgtagctccccgtaaacgcgaaagataatctactgattatagatgaggttgggggctaaaggtgtccttcgatgcgacctgcgctcattttacaaatgcggtccatcttgtcgaggcctgcaagtcggtgcgtaatcatcagcagggttttattccggcccagcgtctcaagcagagcaaggatatggcgttcggttgctgcgtccagcccttccgtcggttcatcgaggatccacagcggcgcatcgtggagcagcgcgcgcgccaacccaagcctgcgctgttcgccgccggagagttggcgaccgccttcaccaagccaggcgttgagcccgtcgttatcgaggagattgcccaattcaacctggcgtaatacttcggcaagacgttcgtcgtggctcgcgggcgcggcaagcagcagattatcccgcagtgtgttgttgaaaacgtgcacccgctggcttagaacgctcaccatgctgcgcaagttagattcttggtattcccttaatgaaacgccgttaagcagtatacggccttcctgagggtcccacgcgcgggtcaacagctgtgccagcgtggatttgccgcagcctgtcttacccagcagcgccacatgctccccggcgcggatgtccagactgatgtcttccagcaccggcaagggttgattgggataggcaaagctcactccctgaatcgaaatgctggcctcaggcaacacggatgcgcccgtgacaggaaacaccacggcgggccgctggctaacaatctgcgtcaccctttcggcagaggccatcacttgtccgaaatgctggaaggctccggccaccggcccaagcgcctcgaaggccgccagcggcgtgaagacgaacagggccaataacgcacccggctcaggcagcgatcccacgccgcctgcggccagccacagcagcagacaaagcgtcaggccagatgcggcaatcatcaacgcctgtgagagcgcggaaagtttagcctgctgagcctgacggttaagccagcgtcgttcgatatcatcaagctgttgcctgcgcggcgactcaacgccataaatcaccagctcggactgactttgcaaccatccgccaagctgggtgcgatattcagcgcgaagctgagtcaggtcgcggccgataggttggcccgcacggtagaatataatcggcagcagcactagcagtgccagcataattccgccgagggtaagcgctaactgcaggtcgagatagctcagtccgagggttacccccacaatcactaccagcgcagcagtcagcggcgagatgacgcgcagatagaggtgatcaagcgtatcgacgtcggccaccagtcgatttagcagttcagccttttgaaagccagccagtccacctggagaaagcggcagcaggcggctgaaagtaaacacccgcaaatgtgccagcacgcggaaggtggcgtcgtggcttgccagcctctcggcatagcgcccggcggtgcgaaatattgccgcgccgcgaaccccggccgcaggcaacatgtagttaaaactgtacagaccagcgagtccggcaagcgctgaagcggcaaggaaccagcccgacaggctgagcaaaccgatgcttgccagcagggtgattatggcgagcacaacgcccagcgccatgcgcacccagtggcggcgatacagtgcaagatagggcagcaaaattttcatgaccgcgtctcctgactccgctgggcaagcagtctggcaaaaggccccgcctgagtgctcagctgctggtaactgcctttttcgaccagcagaccgtcgtccatcacccacacctcgtcgtactgcgcagcctcttcaaggcgatgagtgaccagcagcgtggtttgctttttagccgccgcgttgagtgcgctcatcacgcgagactcgctgtctgcatcaaggctggcagcgggctcatcgagcaacaggagctgacaggggagagcagggcacgagccaccgcgacgcgctgtgcctgtccaaccgacaggcgagccgcatcttcgccgacagcggtatcaaggccttccggcaggcgcggcagaaactcgtcaatgtatgagcgtgcaatgacctctttaagcagtgcttcgctggcattcggctgacccagcaaaatgttttggcgcagcgtttcttcgggcagatgcggattttgccccacccagcttatttgttgccgccattgcgtcgcgatgatgtctttcaactcctgcccattgacgtgaagctgccctgatacggcataaagccgagtagggcattgagcagagagcttttgccggcaccgctgaggccgacaatcgcgatactgcgtcctgcgggtacgctgaagtccagcgggccggcaatttgctgtccctgtggagagaagattcgcagccccgcggcctcgagtgcgaccgggccgctgctttgccaatactgggtacctttcatcggctgttctgcttcggcggtcaagaacgtcagcaggctttctgctgccccaaccgcctgtgccttggcgtggtaaaacaccccgagatcgcgcagcggctggaagaattctggggccaggataagcaccagaaatccggcgaacagggtcactggtgtgccgtaatgaccaaagtcgagttcgccgagataggagaagccaaagtaaaccgccacgacggcaatcgagatcgaggcgaaaaactccagcacggcggaggagagaaacgccagtctcagcacttccatcgttcgcgcgcggaagttctcggtggactcctcaatttggcggatttcggcgtcggcgcggtgaaacaggcgcagcgtatccaggccgcgcaggctgtcaagaaactgcccgctaagcctggccagtgcctgaaagttgcggcggttggcatcggccgcccccatgcccaccagcgccatgaaaagggggattagcggcgccgtcgccagcaaaattagtgcagcggcccagttgatcgggaaaaggctaaccagaatcagcagcggaataatacccgccaacgctatctgcggcagataccgtgcatagtagtcgtgcatgtcttcgatttgttcgaggatgagcgtcgcccagcttcctgctggtttgcctttgatccacgccgggccgagcacgtgcaggcggtccaataccagccggcgcatctcctcacggataacgcgaccgcagacaaagccgacctgttcgcgtagccaggtcacccctgcacgcagcaaaaaggtcaatgctaaaaacaggaagctttgccacagcgtctcgcgcggcgtgtgggtgatgatcaaactgtgcagcagccccgccagcagccaggcctgcgctaaaacaagcagaccagacaacaggccaagcatcatggaaaggtggatccagcgctttgctctcgcactttgttgcttgagccagcggattaactcttgttgccgtgttttgttcatcccagatttattcatcccagataaggcgaatgcagaacgcataatctcaaaaagcactgtgagagtgcgattgtcctttgttttccgtgttggccggaaatcccgcacattctacagggtctttatggcgctgaacacacccgacttttacaaaaaaatgctgcatttacaaacaaaaaaggcgacccgagggtcgccttatgcttagcagatcagaacgtttaacattcactgccagtgcgtaacattattcgacgttagcctgtgctaaaccgtcgagataacgttctgcgtccagcgcagccatacagcccgttccggcagaggtgattgcctgacgatagatatggtccatcacgtcgcctgcggcaaagatgcccggaatgctggtctgggtcgcgttgccctggatacctgactgcactttgatgtagccgttttcgagctcaagctgaccgccgaagatgccggtgttcgggctatggccgatggcgataaacataccggcaacgtccagactgctgatttcaccgttgtgtacgtcacgcaggttggcgccggttacacccatctcgtcgccgacaacttcttcaagcgtcttgttggtgtgcagcacgattttaccgctggcaactttgtcgtgcagacggtcaatcaggattttctcggcgcggaagttctcgcgacggtgaatcaggtgcacttcagacgcgatattggcgagataaagtgcttcttcaacggcggtgttgccgccgccgaccaccgcgaccttctggttgcgatagaagaaaccgtcgcaggttgcgcaggcagaaacgccgcgacctttgaaggactcttctgaaggcagaccgaggtagcgtgccgatgcgcctgtcgcgatgaccagcgcgtcacaggtgtactcttcgctgtcaccgaacagacggaacgggcgagtctggaagtcgacgcgattaatatggtcaaaaatgatttccgtattaaattttaccgcgtgctcgtgcatacgttccatcaggcctggtccagttaaaccttcaggatctcccggccagttttccacttccgtggtggtggtcaattgaccgcctttttcgatgccggtgatgagaaccggcttcaggttggcgcgcgcagcataaactgcggcggtgtaacccgcagggccggagcctaaaatcaataacttactatgttttactgtacccatgggaaattcatctccgtgatggcgaactacgtgatgatagggattgtagggaaaagtgcggcgtaaaaaaagcatactccgatgttgttagcgatttgtctgatagtttttacctgtaatcgcaggtaaaaatgattttggtatgagtttctctttttacttttgttattgttcaatctgaaaagacagcgaaaaaggacgttgagggttttcaatctggcacgttcttctgattttgcttcttttgctttgacaatccgctgtgcatttgcgaaaacatctaggtaagaagaaattaaacgccagcttgtgtctcaaaattacgcaatgtgatgccggtttacccgttgtggctattgcagtgttcactttttagacatcggcagctacgagtttaggttttattgcgcctaattagtcacttagcgttatttctttttttggcttcactaaaaaaattcgttttcttctgacaggggcaagacgtcttaaggtgagtcgcaacctataaaaaacaggtcttcgcttaggataaacccttattacattgaagttggttagggtatggcaagtgcatggaaggacatcagagagataataataatggtagataacaagaaacgtccgggaaaagatctcgaccgcattgaccgtaacattcttaatgagctgcaaaaggatggccggatctctaacgttgagctttccaagcgtgtaggtttgtcgcctacgccatgtctggaacgcgttcgtcgtctggaacgtcagaatttcattcatgggtacactgcgttgcttaatccacactatctggatgcttcgttgctggttttcgttgagattaccctcaaccgtggtgcaccggatgtgtttgagcaattcaatgcagcagtacaaaaactagaagatattcaggagtgtcacctggtttctggggacttcgactacttgttgaaaacccgtgtacctgacatgtctgcttaccgtaaactgctgggcgaaacgctgcttcgtttacctggcgttaacgacacccgtacctacgtggtaatggaagaagtgaaacagactaaccgcctggtcattaagactcggtaagtaaaaggtacaggtgcaaaacctaattaatttagctacactcctgtgtatccatacagctctggcgtcgggaacttttctcggcgctatcgctatttcagttcacaggaacctggagagcctttcttgagccaggaatatacagaagataaagacgttaccctgaaaaaactcagcagcagccgccgtattctggaggccttgctggttgtggtagcggtgtttgctgtttaccttatggcagcactactcagtttcaatccgtccgacccgagctggtctcaaacctcttggcacggtcctatccataatttgggtggcggtgtcggagcctggatggccgatacgctattcttcatttttggcgtgttggcgtatgccattccgccaatcatgatctgcctttgctgggcctctttccgccagcgagacagtcaggaatatatcgactttttcactctgtcattacgtctgatagggacgctggcgctcgttattacgtcatgcggtcttgcgtcacttaacattgatgacctctattacttcgcttctggcggcgtgataggcagtctgctgggcacagccatgacgccgtggttcaacaacgtagggggcacgctggtgctgctttgcgtgtgggccgccggtctgacgctgtttaccggctggtcatggctgacgatcgccgagaaaattggcggcgcggtgctaggggtgaccacctttatgaccaaccgctctcgccgtgacgacgactacgactacgacgatcgccatgaccatgacgatccgctgctggacgacgaagaacatcctgttcgcgcgccggtttccgctgcgccagcggttgctgtgtctgccgccgctctggctgccgaagacgatgacgtcctgttctccgcgccttcagtgcacggcacgccggtcgcacctcaggccgctgcagcggttaatgctgcgccgcagtctgaggttgagccggtcgcccctgtgcatcaggaacctgctgccgtcacgccggcacctgtgcagccacaggccccggtacagcagtattcatctgttcaacaggtctctgtgcaacctttacccgtgcaacagcaggcaccgacgccggccgtcaacgatgcgcaacagcctggacatccagaaacgccaccgctttacagcttcgaattgccggaagaaacgcctgcaccgagaaacgttcagccttccgcgacttctcgtcgctttgatgagccgcagttgggcgactggaatcaggtcactgaaccgcatcacgagcgttcaccgtttgatttcaatgctgcccagaagtggcgagtattgccgcaacggcggcgctggcaaccggtttggcgcaggcagggaaatctgccgccgccgaggctggcaatacctttatgcccgcgttcagcgcagtcagtgatgagaatccgcaaatcaagaaaggcttcggccctgagctacctcgtccgaatcctgtcaagcttccaacgcgccgtgagctagcttcctatggcatcaagctgccgtcgcaacgtatcgccgagcagcaggagcaggaagccgcacgccgtgcgcaggaagcacaggctcagcaagagcaggctgcatcccactcggttgaggaccaagaggcgatgcaggaagccgcgctcaggcaggcatttgtcgatcaacagaatcagcgctacggccagaccgagagccaggctttcgaacaggcaagcgaagaaacagtagacgatgaagatgcgctgttacaggctcaactgcgtcaggaatttgccgcacgtgagcaggcgcgttaccaaactgccgaacctgagcaggcgcacgttcagccttatcaggagaccactttccgtcaggaagtgcctcagtacgatcaggctgcgcgcgtgagcccggtgtcgagccagaatattagcacccacgacgccttcaatttctctccgatggctgacttggttgacgatacgccggtcgagccgctgtttacgctctctccgcaggttgatgagtcaaggcaaccttctgcctacagtcaaagtgcaccttctgcgccgattgagacttcgcagcccgtcgagccgcagaaaccgcagatggacagcctaattcaccctgcgttgatgcgtaacgagcatcctgtcagcagaccgaccacgccattgccaagccttgatctcctgacctcggccccggcaacggaagaaccggtagacatgtttgcgcttgagcaaacggcgcagctcattgaagcccgtctgaatgactatcgcatcaaggccgaagtggtcgacaagctgcctggcccagtcatcacccgtttcgaacttgatctggcaccgggcgtaaaagcggcacgtatttcaaacctgtctcgcgacctcgcacgttcactgtctaccgtggccgtacgtatcgtcgaggttattccaggcaagccttacgtcggcctggagctgccaaacaaaaagcgtcagacggtttacctgcgcgaagtgctcgattgcccgcagtttaaaaacgatccctctccgctgaccgtggtactgggtaaagacatcgccggagaaccggtggtggcagacctcgcgaaaatgcctcacctgctggtagccggtactacgggttcgggtaaatcggtgggcgttaacgccatgatcctcagcatgctgtataaggccacgccggaagacgtgcgctttatcatgatcgacccgaaaatgctcgagctgtcagtgtatgaaggcatccctcatctgttgaccgaagtggtcactgatatgaaagatgccgctaatgcgctgcgctggtgtgtcggtgagatggagcgacgttataagctaatgtcggcgcttggcgtgcgtaaccttgccggttacaacgagaagattaaagaagcggaagcgatgggatggccaatccctgatccattctggaagcctagcgacagcatgggtcacgagccgagaaagctcgggaaagaaccgtttatcgtcgtgctggttgacgagtttgccgacctgatgatgaccgtaggtaaaaaggtcgaagaactgattgctcgtctggcgcagaaagcgcgtgcggcggggattcacctggttctcgcgacccagcgtccttcggttgacgttatcaccggtctaatcaaggcaaatatcccaacccgtatcgcctttacggtctcgagcaaaatcgactcgaggactatactcgatcagggcggcgcggaatcattgctggggatgggtgacatgctttatatggccctaactcatcgattcctatccgcgttcacggcgcattcgttcgcgaccaggaagtgcacgcggtcgttcaagactggaaagcgcgcggccgtcctcaatacatcgacagcattatcaagggcggtgaagagggcgaaggcggcgcggccggtttggaggagggcgaggagcttgacccgttattcgatcaggccgtggagtttgtggttgaaaaacgtcgtgcatcgatctccggcgttcagcgtcagttccgcatcgggtataaccgtgcggcgcgaatcgttgagcaaatggaggcgcagtctattgtcagtgcaccgggacacaacggtaaccgtgaagttcttgcaccgcctcctcacgaataagtggggagttctcaagggccgcgaatgcggcccttggctatttcagcaaatgcaaagaatcgtaaaagctaaccttctcagacgattgagctatcgaagcgtcccttgcttcgctaaagtttagctcctggggttgttttcccgggtattcccccaattgttgggagaggtcgtctgttcgcaatggattttgaggtaacaataacaatgaagaaattattagccgtaagctgtttattgaccgcatttatttcaggatctgtgctggccgacgccagcagcgatttaaagagccgcctcggtaagctgaataccttccacgccagctttacgcaaaccgtaaccggcgatgacggttccaatatccagcagggagaaggccaactgtgggtgaagcgtccgaacctgtttaactggcacatgacaacgccggacgaaagcattctggtttcagacggtaagacgctgtggttctacaacccgttcgttgagcaggtaacggcgacctggcttaaaaatgccaccggcaatacgccgttcatgctgattactcgtaacgacagcagcgactgggcgaaatataacgtttcgcaaaagggggatgacttcaatctgactccgaaatcggcgaccggtaacctgaagcaattctcaattaccgtcaccccgaccggcaccatcaaaagctttaccgcgattgaacaagacgggcagcgtagcgcctacgcgctgaagggcgagccaaatgccgccgtcgatgatgctaaatttaaatttactccgcctaaaggcgtcacgctggacgatcagcgtcagtgaggacttggtgagcaatctgtcactcgatttttcccacaatgagtttcagccactggccgcaagaatgcggccggtaacgctggctgaatatattggtcagcagcatctgctggctcccggaaaacctttgccgcgcgctatcgaggcggggcaactgcactccatgatcctgtggggaccgccgggaacgggaaaaacgacgctggccgagctcattggtcgctacgccaatgccgacgttgaacgcatttctgcggtgacgtccggcatcaaagagatccgcgaggcgattgagcgagcgcgtcagaaccgtgacgtaggccgccgcaccattctcttcgttgacgaggtccatcgtttcaacaaaagtcagcaggatgcttttttgccgcacattgaagacggcaccatcaccttcattggcgcgacaaccgagaacccttcgtttgagcttaactctgcactgctgtcacgtgcccgcgtttatctgctgaaagccttgacccagacgatatcgagaaggttatcgatcaggcgatgagcaatgccgaccgtggctatgcggggcaaaatattcgtattccgccgcagacgcgccgtatgttggccgagttggttaacggtgatgctcgccgagcgttgaacagcgtcgaaatgatggcggatatggccgaagtcgatgctaacggggtaagaatactgacgccggagctgctgaaagagatctcgggcgagcgcagcgcacgtttcgataacaagggcgatcgctattacgatttgatttctgcgctgcataaatcagtgcgcggttcggcacccgatgcggcgctgtactggtatgcacggattattaccgccgggggtgacccgctttacgtggcaaggcgtctgttggctatcgcctccgaagacgtcggcaacgccgatccgcgcggtatgcaggtggcgatagctgcctgggactgcttcacccgcgttggtccggcggagggtgaaagggctatcgctcaggccatcgtgtatcttgcctgcgcgccgaagagcaatgccgtttacaccgccttcaaagccgcgatgcgtgacgccaaagagcaggccgattttgacgtgcctgaacatctgcgcaatgcaccgaccaagctgatgaaagaaatgggcctcggggcagagtaccgctacgcgcacgacgaacccaacgcctatgccgctggcgagaactatttccccctgagatggccaaaacgcagtactattatccgtccgcacgcggcatggaaggaaaaatcggagaaaagctggcgtggttggctgaacaagatcaaaatagcccgacaaaacgctaccgataaatttgctgttgcggtaaggttatcgctgataactctttgacatgctgccgtttcaggcagtatgtgccatcaaaattttatttaattcaaaactaacaggattagcatgctcgatcccaatctgctgcgtaatgagctagacgcagttgcagaaaaactcgctcgcagaggttttaaactcgatgtagaagcattgcgtgctcaagaagagcgtcgcaaagtgctgcaagttgaaacggaaaatcttcaggctgaaaggaatgcacgatcgaaatcgatcggtgcggccaaggctcgcggcgaagacatcgatgccctgcgtcaggaagttaacgaactgggtgacaagctgagcgcggctaaatccgagctagaagcactgctggaagatatgaacaaagtcactcaggcgctgccaaacctgcctgatgattgcgttcctgttggtaaagatgacagtgaaaacctcgaagtcagccgttggggcgagccgcgtcaattcgactttgaagttcgcgaccacgtttcccttggcgaactggccggtggcctggatttcgccgccggtgttaaactgaccggtgctcgcttcgttgtgatgcaggggcaaattgcccgtatgcaccgcgcgctgtcgcagtttatgctcgatctgcacaccgagcagcacggttatatcgaaactgccgtgccgtatctggtgaaccacgattcactgtttggtaccggtcagttgccgaaatttggcgaagacctgttccataccaagccactgggcgaagaagcgggcagcagcaactatgcgttgatcccaactgccgaagtgccgttgactaacctggcgcgcgacgaaattcttgaagaagaatctctgccgctcaagttgactgcgcacacgccgtgcttccgctctgaggccggttcttacggtcgcgatacccgtggtctgatccgtatgcaccagttcgacaaagtcgagatggtacagatagtccgtcctgaagactccatgcaggcgttggaagagctgaccggccatgccgagaaagtactgcaactgctgaacctgccgtatcgtaaaatgctgctgtgcaccggtgatatgggcgcaggctcttgcaagacgtacgatctggaagtgtggctgcctgcgcagaacacctatcgtgagatctcctcatgctcaaacatgtgggatttccaggcacgtcgtatgcaggctcgtacccgcagtaaaaccgagaagaaaccccgtttggtccataccctgaatggttctggtctggcagtgggccgtactctggttgcggttctcgagaactaccagcaggcagacggccgcattgcggtaccagaagttctgcgtccttatatgcgtggactggaattcatcggttaatttaccgggtaaagaatccccttcccttgcattcacaaaggccgatcgcttacacgattggcctttgtttttaggcgtaagggaagagggcagagcgatgatcttcatcggcgatattttttaatcgaaacgggaatacaacttaaatatttatcaaatatctagcgcgcctgttgaataaatcccttacttatcattttgataccatttttttatttttgacacttagcggcaacgtttagtgattgattagttatttaaatcatagaaatacagattgtgcggcggagtgatttcgcccaattgacttttatccggccagtggcattatgcgcgcaatttcatcgtatttctggtcgctcattccctatgtctgcttactctcgcccggtgctattgctgctctgtggccttttactgttgaccgtgtctattgcggttttgagcaccctcgtccctttatggctgacgcatgaagccctgcccacctggaaagttgggctggtaagttcttcatactatgcaggtaatttagtcggcacgctgatagcgggccgcctgattaaacgcctgggctttaacgtcagttatcagctttcctgcattcttttcgccgtggcgaccgccggtctggcactgtctgtgaatttcttgggctggataagctggcgttttatggccggtgtgggctgtgcgttaatctgggtagtcgttgagagcgcattgctgcgtagcggcacggttaaaaatagggggcagctgcttgccgcctatatgattgtctattatatcggcaccgtagccgggcaactgctgctgggcaaagtctcgaccgaactgtttaccgttatcccgtgggtaaccggactgattgtggtcgctatgctgccactgctgtttgcgcacatcgccaatcaggacagcgaacagccacacacctctatttggcctatgttcaaacgccgcagcgcccgtctgggcattaacggctgtgtgatttcgggtattgtactgggttcattatacggcctgatgccactgttcctggctcatcgcgggttaagcgatgcggacgtcggttactggatggcactgctggtgagttccggcattatcggtcagtggccggttgggcgtctcgctgaccgctatggtcgtttgacggtgctgcgggttcaggtgtttgtggtcattctgggcagtatcgccatgctcagcggctatgcaatggcgcccgcgttgttcatcctcggctgtgcaggctttacgctgtatccggtggcgatgtcttgggcctgtgaaaaggtgaaccccgacgagctggtcgccatgaatcaggcgttgctgatgaattataccatcggaagcctggcgggtccttcaatgactgcaatgctgatgcagaactactctgaccgcgtactgtttgtgatgatagccgcggtggcgttggtctacctggtgatgctgctgcgcaaggcggaccatcagtctacccctgttgccactgcctgaattatcaatcagttaacaggaaaactcattttcgtcgcaacaaggcggcaagagaactcatcccgatgagctgacataggtcagtgattcgggtgattgagcgcagccaacccggctgcggctccaaagaccagggactttagtacatcactttgtggccgtagccttctaaaattcccttcaccctatccataatctctttcgtcggcggactcacgccatctagcccatacttctcgcccatcgcagtccatttatgcttgccaagctcgtgatacggcagcagctcaatcttctcgatgttggtcatgtctttggtaaattcaccgagtttatgcgccgactcatcatcgtctgaccagccgggaaccacgacatagcggatccaggtgcgctgattgcgttttgccagatactgcgcaaactccagcgtacggtgatttgatacgccgaccagcttctggtgtacttcgtcattcatctgcttgaggtcaagcatcaccaggtcggtcgcgtcgatcagttcatcaatgaccggatcataacggcgcacaaagccgttggtgtcgaggcaggtgttaatccctcggtatggcatgcgcggaaccagtcgcgaacaaactctgcctgcaaaatggcctcaccgcccgaggccgtcacgccgccaccggaagcgttcataaagtggcgatagctcaccacctctttcatcaggtcttcaacattgatctctttaccgccgtgagtgtcccacgtatcgcgattgtggcaatacatgcaacgcatcaggcagccctgaaagaagacgataaagcggataccgggaccgtcaacggtaccgcaagattcgtaggagtggatgcgaccttgaacagacattgcgggtgttctccaatgtgaaaaggctccacgtgagcggagccttaaagaacgaagcgattaactcatcactctcttacagcgttttagtaaaggtacgggtaatcacgtcctgctgctgttctttggttagtgagttgaagcgtaccgcatagcctgaaacgcggatagtcagctgagggaatttctcaggattttccatggcctccagcagcatctcgcggttcattacgttaacgttcagatgctgaccgccttcgatagacgattcgtgatggaagtaaccgtccatcagacccgccagattggctttacgcacgtcatcatctttacccagtgcgtttggcacaatggagaaggtgtaggaaattccgtccttcgcgtaggcaaacggcagtttggctaccgaggtcagagaggcaacggcgcctttctggtcacggccatgcattgggttagcgcctggaccaaacggtgcacccgcgcgacggccgtctggggtgttaccggttttcttaccgtacaccacgtttgaggtgatggtaagcactgactgggtcgctacggcatcgcggtaggttggcagtttctgaattttcttcataaaacgttcaaccaggtcgcaggcgatatcatcaacgcgtgaatcattgttaccgaactgtgggtactcgccttcgattttaaagtctacggcaagaccgtcttcatcacgaatcgtgctgactttggcatacttgatggcagcaagtgagtcggcggcgactgaaagcccagcaatgccacaggccatggtgcgatagacgtcgcggtcgtgcagcgccatcagcgaggcttcatagctgtatttgtcgtgcatgtagtgaatacagttcagtgcggtcacatactgtttcgccagccagtccataaagtgatccatacgttccatcactttatcgtagtcgagaacctcatccatcatcggcgcttctttagggccaacctgaattttcagcttttcatccacgccgccgttaatggcgtacagcatagttttcgccagattagcgcgtgcgccaaagaactgcatctgtttgccgacaatcatcgggcttacgcagcaggcgattgcataatcgtcattgttgaaatccggacgcatcaaatcatcgttttcatactgaatggatgaggtgtcgatagacactttggcggcgtatttcttaaagttcaccggcagtttttcagaccacaggatggtcatgtttggctccggtgacggacccatggtgtagagagtattcaggaaacgataactgtttttagtcactaaagtacggccgtctacgcccatcccggcgagagactcagtcgcccagattgggtcaccggagaacagctcgtcatattctggcgtacgcaggaagcgcaccatgcgaagtttcatcaccagatggtcaatcagctcctgcgcctgctcttcgttcagcttaccggccttgatgtcgcgctcgataaagatatcgaggaaggtggacacgcggccaaacgacatggctgcaccgttctgcgattttactgcggcgaggtagccgaagtaggtccattgtacggcttcttgtgcactgttagccggtcctgaaatgtcgaaaccgtatttggcggccatctcttttatttgagccagcgcacgatgctgttcggcaatctcttcgcgcagttgcagcgtcatttgcaggtcttcgccattttcgagacgagattgcagagactggaactgggcaagtttgtcagccatcaggaagtcgataccgtaaagcgctacgcgacgatagtcaccgatgatgcgtccacgaccataggcatcaggcagaccggtcagtacaccggatttgcggcagttaaggatgtctttggtgtaaacgtcaaatacgccctgattatgggttttacggtattcggtgaagacttttttcaactgtgggtcaagttcgcggccatagaccttacaggagccttcaaccattttgatgccgccaaacgggataatggcacgtttcaacggcgcgtcggtttgcaggccgacgatggcttccagcgatttattgatgtatcccgcatcgtgcgaggtaatggtggaggcgaggtcggtatcgaaatccacaggcgctttggtggcgttctcctgcttgataccctccatgacgctgtcccagagggtagtggtcgcttgcgttgcgccagccaggaaagattcgtcaccctcgtaaggggcgtagtttttctgaatgaagtcgcgaacgttaacttcggtctgccattctcccggggtaaaatcttgccatgtagaggtcaatttttcattgagattagacattttgtacctaccttctaattttgatttttcaagaaattgcgttatcgagataacttgaaaacaagtttaaaaattttgagacaagccgcgtcggatattagtgaggctgctcatcacggagatatatgacccagtaggtcaggccgaccagcagaccaccgccgatgatgttgccaatagtcactgggatcagattgtcgacgataaagttggtgatattgagttcggcgaacttctctggtgcgctgccaacggcttgccagaagctggctggcgcgaaacatttgatgacgatgcccagtgggatcatgaacatgttggcgatgctgtgttcgaatccgctggcaacgaacatcgcgaccggcagaatcatggcgaacattttgtccatcaggctgcggcccgagtagctcatccacaccgcaagacagaccatcagattggccaaaatgccgaggcaaacggcctcgatgaaggtgtgatgcattttatggtcggcggtttgcagtgcgttgagtccccacagaccgttgtcggtcatcatcatgccggagaaccagatcaacgcgacaaacagcaacgcaccgatcagattaccgatataaacattggcccagttgcgtgcgagctgccccaggtaattcggccactggccttggcgatgacgataagcacggtggaggtaaacaggtctgcgccgcagaccaccaccagcatcaggccgagtgagaaacagatgcccccaaccagttttgccaagccgaaaggcacggcggcagtgccggtggttgaggtcaggtagaaaacaaaggctatcgaaataaagacgccagcggttatcgccaggaaaaaagttttgataggttgcttagtggctttgtacacccctgcatcttcagcaacttttgctgtggcagcgggtaataataaattgaaggggttgtcagcgttcacattaactctctcttatgaagggccatgcactgcatgaaagatattagcaacgtagtgtagttgagatattgatttggatcataagtcgggtctgaacgagggagtgttgcgggattttaatacgtagttttatagttaaccttatgatttttaatgtaaaaaaactttttaattcttgcaaaaaatgttgaaggtaacctgaggttattgcgcttgttcattgaattatatgcaataatcagaaattaccctgcggtacgaacctttggggctgtctgttattttgaaatataaaagtgccgctttgcagcgtattttaatgtcagggagcaattttgcgatatttaacgcctgtttgctcggagagtcaaagcagttaaaccaatttattttttcactggaatcgaggtcgtgaaaaccggcttatttttcataacgtactaataaaaaaccggcagtttcccgccggtttgatggagtcaatgatcaggctgaagccttaggcttttgaccagtgacgacgcttggcggcctgcaatttttcgtaagcggccagcagaccctgatgcgctggcagcgcttttagctcggggtcaaccgcaaacaggccatggaaacgctcttcaccgctgatagcagcagaagcacggtcaacggcttcctgaccgtacatcttaacaaacgccgtgtagtactgggacgcttcgcgctctggctcaagtgccagctgcagcagcgtttgcaggcaacggtagtagttgttgcgttctgcgctgtaaacggaggcgttaaactcgtgcgcccattcagcccaggtcagcgcctgttccatatcccgccggccagcgccagcatagatttcagctcgccaacgcgcagcgtgtaccagccgttgtctttaccgctggcaatgcccagcagttcacgaacgcgggtgaagtcgtccagaccttcgtcgtccagctgggtgatcatttccagatattcttctggagcgaaatcgctgtccggaagcgccaggatttgctcgcgcaggtgggcgcccatgctgttattagccagcagcaggtcttcggcagggtaaatgtcggacatgcctggaacgatgatgcggcaagcgtaaacgtcgagatgctcatagtcggcgatgtaaacctcggcgtcttctttgtcgaagatagccatcagcgtcgcgaactcttcttcggtggtcccgctgaagctccagtcaacgaacggatagtctgcgtcctgcttgaacaggtcccaacagataaggccgcttgagtcgatgaagtgggtttcaaggttcgcatgctctgccacttcttcatcatcgaaggtcggtgcagtgaacacgtcgagatctttcaggctacggccctgcagcagttcggtaacggtacgctcaagcgcaacgccgaagtcagggtgagcgccgaaggaggcgaaacaggtgccattggctgggttaaacagcacgacgcagataaccggatattcgccgcccagggaggcgtcgtaagaaagaatagggaagccttcttcttccagtttggcaatcgcttcaacgacgccaggatagcgcgccagcacgtcggcaggaatttccggcaggctgatagattcagcgatgatgcgattcttgacataacgttcgaagacttctgacagaccctgaacgcgcgcttcgttagcggtattacccgcagacatgccgttggagacatacaggttaccgataatgttcatcggaatgtagacggtttgctggtctgactgacgggtgaacggcagggcacagataccgcgatcggcattgccggactgcaggtcgatcaactcgctgccggtcagctctttctctgcgtcatagaacgcatgcagacgctcatcgagaatgcccgcaggcagactgttgtcggccgggatcgggaaccatttttcatttgggtagtgaacgaaatcgccttcggcaatatcttttccgagatagaagtcggcgaaaaagtagttggtagacaggcgttcgaaatattcgcccagcgccgaggccaatgccgcttttttactggctcccttgccgttggtaaagcacagcgggcagtcgcggtcgcggatatgcacggaccagacgtgcgggaccggattcagccacgaggcctcttcaatattgaagccgaggtcggtgagtttttgctgaaaacgggagatggagtcttccagcgccgcgtctttgccagggataaaagtttgcgtcattgagttcacttttgtgcgttctaaaaacgcgcaatgatacggggtttttgacctgagctccacgtattcatgccactaaggaaaaagaatatgacggccgccgacatgaattttattactgattattaatctttggtgaataacaattgcagccggtggtgaccagtgataaaaccgataaactggttgtggatacacgcaaacgattcaatgtggcgaactatcaacaactcaactggctttcaagtagctatcaaagagaagtggtgaggggaaatgactcaggtttataattttagctcaggtccggcaatgatcccggctgaagtcttacgtcgtgctgaacaagaactctgtaactggcacggtctcggtacctcggtgatggaaatcagtcaccgtagcaaggagtttattcaggtagccgaggaatccgaaaaggatattcgtgacctgatgaacatcccctcgaactataaagtgctgttctgtcacggtggcgcgcgcgcccagttcgctgctattccactgaacctgctgggcgacaaagccaccgctgactatatcgacggcggctactgggcgcacagcgcggtcaaagaagcgcagaaatattgcaccccgaacgtcatcgacatcaccaccactcagggtgacaaacgtggtctgctgccaatgagcgagtggaaactcagcaaagacgcagcctatgttcactactgcccgaacgaaaccatcgacggcctggctatcaccgaaatgcctgattttggcgataaagtcgtcattgccgactactcatcaaccattctgtccggcccaatcgacgtgagccgctttggcgttatttacgccggcgcgcagaaaaatatcggtcctgcgggactgacgctggttatcgtccgcgacgatctgttgggtaaagcccgtaaagagctgccttctatcctcgactataccgtgctggcagagaacgactccatgttcaacacgccgccgactttcgcctggtacctgtctggcatggtctttaaatggctgaaagagcagggcggtctggtcgaaatcgaaaaacgcaacaaggccaaggccgagctgctttacagcaccatcgacaacagcagtttctaccgtaatcaggtggctgacgctaaccgttcacgcatgaacgtgccgttccagctggcagactctgctttggatgccgtcttcctgaaagaatcacttgaagccggtcttcacgcattgaaaggtcaccgtgtggtaggcggcatgcgtgcttccatctataatgcgatgccgctggaaggcgttcaggcgctgaccgcgttcatgagcgacttcgaaaaacgtcacggctaagtcgacgtttcactaactgtttgatttgcattttattttttacaaatgcttttgattgaacaataaccccggcctaaatccggggttatgtttttttaaactaataccgatgtacggagaaattgtggaagccctgaccctacaacctgttgcgcgagtaaacggcacaatcaacttacctggctcgaaaagtgtctccaaccgtgcgcttttgttggctgctttcgccaagggaaccactcgcctgactaatctgctggacagcgatgacgttcgccacatgctgaacgccctgacccagttgggtgtgacacaccgcctgtccgaagaccgcactcactgcgagattgacggcctcggcggtattttccctaaagccgactccctcgagctgttcctcggtaacgcgggtacggcgatgcgtcctctggccgcggctctgtgtctgggtgagcagaacgtggtcctgaccggtgagccacgcatgaaagagcgcccgattggccatctggtcgacgcattacgcctgggcggcgcgcaaatagactatctcgagcaaaccgattatccgccactgcgcctgcgcggtggcttcaaaggcggcgaaatcagcgttgacggcagcgtatccagccagttcctgaccgctttgctgatgactgcaccgctggccgaaaatgacacccttatccgcatcaagggtgacctggtctcgaagccatatatcgacattaccctcaacctgatgaaaaccttcggtgtgaccgtggtcaacgaggattatcagcagttccgcgtgcaggccaaccagagctatatttctccgggcagctatctggtcgagggcgatgcgtcttctgcgtcttacttcctggcggcggcggctatcaagggggcaccgtgcgcgtaacaggtatcggtaagaacagcatgcagggcgacattcgctttgccgatgtgctggagaaaatgggcgcgaaagtcacctggtctgaagactacatcgaatgtactcgcggtgagctgcacggcatcgatatggacatgaatcacattcctgatgcggctatgactatcgccactgcggcgctgtttgctcagggcccgacgacgctgcgcaacatctataactggcgcgtgaaagagactgaccgtttggcggctatggcgacagagctgcgcaaagtgggggcaacggtcgaagagggtgaagactatattcacattgagccgcctgcgacgctgacctttgccgagattggcacctataacgatcaccgtatggcgatgtgcttctcgctggtggcgttgtcagacacgccggttactattcttgacccgaaatgcacggctaagacgttcccagactattttgaccgtcttgcctccctcagcactccggcttaaaaagtcttaagttgctgaaattttcaaaacggacgtccttggatgtccgttttttctttttcgcacagtcatcctgccgccgctatgcttaaataatctctgttttgcctaattgttgaatagttttgccccgttagtgagcttattttccgcaacatagtgatgcggggtaacagttcggctaaaggcagcgtataatgctgcacctgaattagccccgttgggctaacgatgaggggttttccccaccgaaaggagagagaatgacggctatgacttcgtctataaccccagtgataaccgttgacgggccaagtggtgcgggtaaaggcacactgtgtaaggctctggctgaggcgtttggatggcacctgctggactccggtgcaatttatcgtgttctggctcttgcggcgctgcatcatcaggttgatatcgtgtcagaagaggctctggtgccgctcgctgcccacctcgacgttcgctttgtagcgaataacggacacctgaacgttattttggaaggtgaggacgtcacgcacgagatccgcaccgagaccgtaggcaataccgcgtcacaggcggctgcttttccgcgcgttcgcgaagcgcttcttcgccgccaacgtgcgtttaaagagatgcctggcctgattgccgatggccgagacatgggaaccgtggtgttcccggaagcgccggtgaagatttttctcgacgccagccctgaagaacgtgcaaacagaagaatgctacagttgcaggaaaagggctttagtgttaactttgaacgtcttttagccgagataaaagagcgggatgaccgcgatcgtaatcggcctatagcgcctttagtgcctgctcaagatgcattaatgctggattcaaccagtatgtccatcgatgcagttatcgaaaaagcgttggcttatgccactgaaattctaggattgccgcaaaaacaaacccggtgattcgagctattatgggtgctgctccattctttttttgtaaagaacagggtcagtgcctattttggctacagttttttttaacctcgccgccaggacggtagtggggcatttgaaacaaccccatccagcatgaagccagatggacgttaaacttaagaaactaaagattatcaacatgactgaatcttttgctcaactctttgaagaatccttacaaacaatcgaaacccgtccgggttccatcgtccgtggtgttgtcgtgtctatcgacaaagacgttgtactggttgacgccggtctgaagtctgagtctgctattccggcagagcagttcaaaaacgcacagggcgaactggaaatccaggttggcgacgaagttgatgttgcgctggacgcggtagaagacggcttcggtgaaaccctgctgtcccgtgaaaaagctaagcgtcatgaagcatggctgatgctggaaaaagcttacgaagaagctgcaactgttaccggtgttatcaacggtaaagttaaaggcggtttcaccgttgagctgaacggtattcgtgcgttcctgccaggttcactggtagacgtgcgtcctgttcgcgacacgctgcatctcgaaggcaaagatcttgagttcaaagtcatcaagctggaccagaagcgcaacaacgttgttgtttctcgtcgtgcagtaattgagtctgagaacagcgctgagcgcgatcaactgctggaaaacctgcaggaaggcatggaagttaaaggtatcgttaagaacctcactgactacggcgccttcgttgatctgggcggtgttgacggcctgctgcacatcacagatatggcttggaagcgcgttaagcacccaagcgagattgtgaatgttggcgacgaaatcactgttaaagttctgaaattcgaccgtgagcgtactcgtgtttccctgggcttgaaacagctgggcgaagatccatgggttgctatcgctaaacgttacccagaaagcaccaagctgactggtcgtgtaaccaacctgactgattacggctgcttcgtagaaatcgaagaaggcgttgaaggtctggtacacgtttctgaaatggactggaccaacaaaaacatccacccatccaaagttgttaacgtgggtgatgttgtggaagttatggttctggacatcgacgaagaacgtcgtcgtatctccctgggcctgaagcagtgtaaagctaacccatggcagcaattcgcagaaacccacaacaagaacgaccgtgttgaaggtaaaatcaagtcaatcactgacttcggtatcttcatcggtctggacggcggcatcgacggcctggttcacctgtctgacatctcctggaacgttgcaggcgaagaagcagtacgtgaatacaaaaaaggcgacgaaatcgcagctgtggttctgcaggttgacgcagagcgtgagcgtatctccctgggcgtgaagcaactggcagaagacccgttcaataactacctgtctgtaaacaagaaaggtactattgttactggtaaagtaactgcagttgacgctaaaggtgctacagttgaattagcaggcggcgtagaaggttacctgcgtgcttctgaagcttctcgcgaccgtattgaagacgcaactctggttctgaacgttggtgatgaagttgaagctaaattcaccggtgttgaccgtaagaaccgcgttgtaagcctgtccgtccgtgctaaggacgaagcagacgagaaagatgcaatcgctgtggttaacaacaagccagacgaaagcaacttctctaacgctatggctgaagcgttcaaagcggcaaaaggcgagtaataacgggacgcagctccatgatggagctgcttctataacggtagtttagctgcaaagcttggaggttatatgaccaagtctgaactcattgaaagacttgctggccagcactctcatgtcccggcgaaagccgttgaggatgccgtgaaagagatgcttgaacatatggctgcaaccttagctgatggagaacgcatcgaaatccgcgggtttggcagtttttctcttcactaccgtgctccgcgcgtgggacgcaaccctaaaacgggtgacaaagttgagttggacggcaaatacgttcctcacttcaagccaggtaaagagttgcgtgaccgtgcgaacatttatggttaaggactcgtccttagcttagatgtatgcctatagcgaataaaacggtgtcctcacgggcaccgtttttttgctttcggacgcatattttaaaagcctgttttttatttatttattctgggcaacgtttcccagcctccgcttttgccgattgcgcctcataggtctctcaataacactcgtcctctcagttcgcggcttgccgcataccctccctgtggcggaggcaattaaggatgggcatcattaatatcacctatacccagactgcgctggcattagtggcagggatacttccgctgacggttttgccgatattgcccgacagctatcagtgcatcgcgttattttgccttgcctgcatcgccgggtatttgccctatcgcagcacaaaactgttttgcattgcgctgctgggactgctttgggcgacggcaaacggaaatcagattttgcagcaaacgcgagactttagcggcggtaggcagcaggttgtggcgcgcattgaaagcccttttttgcagcgtgaggaaaaacacaatgtcctcatcgccttaaaagaggtcaatggcgtcagggtatttccgccgcttgcggcgaaagtctccagtgagggttttcctcaaggatactgtgccgggcagcgttggttgctcaccatgagtctgaggccggtgcacagccagttaaacctcggcggttttgacggtcagcgttgggcggttgccaatcgccagacgctaagtgggcgtattaactcggcagagcgaataaccgccgggtgttctttacgccagcagatcattagcgacgtacagcggcaaatcaccacgctggataatatgccggtgctacttgctctagcgtttggtgagcgagggcttatcagcaaaccattgagtcaactgtataaggtcaccggcacagcgcatctgatggctatttctggtctgcatattggtgtggcggcactcattggttggctgttggcacgtgcaacacagtttctgctgccgctccgctggatagactatcggttcccgctcattgttagctggttggcgatgctgttttatacatggctgtcgggggttaatcctcctgcaatgcgtgccgcgttggcgatttcactctggcagttgctcaagctgtgccgtctgcgttgtaccgcatggcaagtatggagctggggcgtggcgttgcttatggttagcgacccattgagcattctttcagacagtttttggttgtcatgttttgctgtcgccgggctgatattctggtttcagtgggtgcctttaccgagtcgatatgggcgacactggtactgggcatgggtccgctgggggcatcttcaggcaggaatgaccctattgctgttgccgatgcaaattgggatttttcatgggttgagcagcgcatcctttttcgccaacctctgggcagtgccgattgtatcgctttttaccgtccctttggtattagtggcgctctttttaacgcctctcccctatgatattgcctttcccgttactcaggcgatgtggacgctcgccgatattagccttgattgggttgaggctgggctcaacaaggcggaaaactactggttaccgttaggtgagaacgtgcttattttcagcctgacaggatggctgggcatcataatctggcgtatgggtggatcaaaacctatccgatggacgtcattgcgctgtgcggcgtgatgctgctgtggcgacaatcctcgactcgggaaaactggcgcgtcgatatgttggacgtagggcatggactggcagtattaatcgagaagaacgggcgaggcgtactttatgataccggaaaccgttgggagacggggtcccaggcgcagatgcaaatcctgccttatcttcagtggcgcaacatcgtgctcgatcagataatcgtcagccatagccacatggaccacaacggaggaaccaaacaggtgcgcgccgcttttccttctgccagtctgcggacctcttttaaaggaaatttaccctgtgtgaaaggacagcgctggcggtggcaggaactggattttgaggtgctctggcccccgcgctgaaagaccatgccggcaatgatgacagctgcgtcgtacgcgtcagcgataataaatttagcgtgctgcttaccggcgacattgagcgtgctgccgaaactgtactggtaaagcagagcagggcgaggttacaggttaatttactgcaggttccacatcacggcagtaacacctcctccttcgggcctttcttgcgagcctcggggcagaagtcgctatcgcctcggcgtctcgctacaacgtatggcgtttaccggcgcaaaaaataaaaaatcgatatcgcgaaaacgagatgatttggcacgatacttcacgtgcagggcagttgagtgcgttttttttcaacaattattgggtaattaaaggcctgcgtgatcaattagtgccacgttggtatcatcagtggtttggcgttagaggagataatgcgtagaataggccgctgtttatttcgctgctggttaattgcatgatgaatgataaagatctctccacctggcagacattccgtcgcctctggccgatgatcacaccttttaaagccgggcttattgccgccgctatcgcgctggtggtcaatgccgccggtgataccctcatgctgtcgctgctaaaacctctgctggatgacggctttggtaaaaccgatcgctccgtattgctgtggatgccgttggtcgtgattggattgatgctggtgcgtggggtcagtggctatgtttcaagttactgtatttcctgggtctccggaaaagttgtgatgcaaatgcgtcgccggctgtttggccatatgatgagaatgccagtggccttctttgatcagcagtccaccggaacgctactgtcacgtatcacctatgattccgagcaggttgcttcctcctcctcgagcgcgctggtcaccgtcgtacgtgaaggggcgtcgattatcggcctgttcatcatgatgttctactacagctggcagttgtcggtcattctggtcattatcgcgcctatcgtttctacggttattcgcgtagtgtccaagcgtttccgtaatatcagcaagaatatgcagaacaccatgggtcaggttaccaccagtgccgagcagatgctgaaagggcacaaagaggtgcttatcttcggtggtcagacggttgaaaccgagcgttttgataaagtcagcaaccacatgcgccgtcagggcatgcgtctggtttctgcatcttctatttctgatccgatcattcagctgattgcctcactggcgctggccttcgtgctttatgccgcgagcttcccatccgtgatggaaacgctgactgccggtacaatcaccgtggtcttctcctcaatgatcgcactgatgcgtccgttgaaatctttgaccaacgttaacgcccagttccagcgtggtatggcagcctgtcagaccctgttcagtatcctcgatatggaacaagagaaagacgaaggcaagctgaccgttgagcgcgcaaaaggcgacatcgagttcaaaaacgtcacctttagctatggcaaaagcgaaaaaccggcccttagaaacatctcttttgaaattcctgaaggcagaaccgttgctttggtgggacgttcaggctctggaaaatcaacgattgccaacctgatgacccgtttttacgacattcaggaaggtgagatcctgctcgatggccacgacctgcgcgaatacacgcttgcgtcgctgcgcgatcaggttgcgttggtttcacaaaacgtgcatctgtttaatgacaccattgccaacaacatcgcttatgcacgtactgaaaagtacagccgtgaagacgttatcaaggccgcaactatggcacatgccatggatttcattagcaaaatggataacggtattgatacggtgatcggtgagaacggcgtgctgctgtcaggcggacaacgccaacgtatcgcgattgcgcgtgcgctgctgcgtgactcaccggttctgatcctcgacgaagcaacctctgcgctggacacagagtccgaacgtgcgattcagtctgctctcgacgaactgcaaaaaaaccgtacctcgctggtgattgcgcaccgtctttctaccatcgaaaaagctgaccagatcctggttgtcgaagatggtcgagtggttgagcgcggaacgcatagcgaactgcttgagctacgtggggcttatgcccagcttcaccggatgcagtttggtcaatgatagcgcgcatctggtcgggtcaatcggcactttatctgctgttactgccactcagttggctgtatggattgatcacgctggtattgcgttttagctataaaaaagggtggaagaaaagctggcgagcaccggttcccgtggtgatcgtcggtaatctgactgccggaggtaatggtaagactccggtcgttatctggctcgtcgagcagctgcagcagcggggattacgcgttggcgtcgtttcacgcggttacggtggcaaggctgaaagctatcctttaatacttgatgaggggacgtctacggcacaggccggtgacgagccggtgctgatttttcagcgcaccggtgcaccggttgccgtttctcctgtgcgttccgacgccgtcaaagccctgctgaaagcctcttctgtcgacattatcgtgaccgacgacgggctacagcattacgcattacagcgtgatttcgagatagtggtggttgacggcgtgcgccgtttcggcaacggccactggcttcctgccggaccgatgcgtgaaagagcttcaaggctgaaaagcgtcgatgcgattatcgtcaacggcgacggtcaggggcagggcgatgagataggcatgcggcttcaggccgggaacgtggtgaacgtgttgaccggcgagaagcgccaggcgcaaacgttgtctgacgtggtggcgatggcgggtatcggacatcctcctcgtttctttgccacgctcaaccagctcggcgttcatacgcagcgtgaagtttcctttgccgatcatcaggcctaccagtctgcgcagctcgcggcattggccgctgataatcaaaccttgctgatgactgaaaaggatgcagtgaagtgccgtagttttgcgcaggccaactggtggtatttgccggttgatgcatacctctcagaacctggtgcgacctcgttgcttgaaggcatcagctcgttagtcacgaaatcgtgattaaaacttgacctgcgtagcattatatgagttaatgccgcacggcctgtgattacagagctatttatgaggcagtatcgttaacaacaaaaagttgttaaccctatagtgaatttgttcctcccaagacgttatcttcctgtttgtttccaccaaaagtttgattccgctaaaaagacgaaccttcccataacccccataagtattctttctataaaaatggccatcgttgccttacggcaaaatgaaatgggttactttctgtgaactctcatctgttcttgttgtcaaattcaacaagctacagtgaagtggcgattgactcgacgaaatgcctgccccaatggtgggttcaaaatttgctcattagaggttttttataagaacaactttagtatgggcaaacgcatccgaacaataataaaaagcgttgtcatggatgcccgaaattaaggaaataaaaattatgatgttaaaaatgggtttagttaaatggttcaacccggctaaaggctacggtttcatttctccactcgatggtacttcagagatttatgtaagccgtaattccattgcgaatacgcgtaataaatcgcttaatccaggccagagtgtagaattcaccatttacaacagttcgactcatggcccggcggcagcggacgttattgccttctaagccaggttcagcggcggtgaattttaccccctgacaaaaatatgctatcgatatccgcaacctaatcctttgacggatatcgatatgcctactgcaagcctctccctctctactgcaagcctctccctctctactgcgcgcacgctacatctcgccgcacaacagctgcaaaatcccctaaaacgtcaggcgaaacctgatgatctgctctctgctatcaaaaaaatggcgcttctgcaaattgataccatcagcgtcgtggcgcgtagcccttatctggtgctgtttagccgccttggaaactacccttccgaatggctcgaagaggcgcttttagcgcgcaaaatattcgagtattgggcgcatgaggcctgctttatccccgtcgaagattaccgtctgctgcgtcatcgtatgttgaatccgcaaaacatgggctggaaatttaatcaggcctggttcgacaagcacgaatctgacatcaaggatctgctcgatcatattgctgaaaaaggaccggtacgttcggcggattttacgctggataagcgaggaagcaccggctggtgggactggaagccgcacaagcgccatttggaaacattgttcacctccggtgaattgatggtggcagaacggcgtaatttccaccgcgtctacgacctgcgtagcaatatattgccgcattgggacgacgcaacccagacgctgagtcaggaacacgccgagttcgacatgctctgccgctcggcgcaggcgctgggcatctttcgaatagagtggctggcggactattatcgtctaaagcgcgttaacagcaaaaaactcactgcccagcttctggatctcggcctcattacgcccgtcgaggtcgccggtttcagctctccgctgtatgttcatcagtctctgcaccgccttttggccgaggccgaggcaggcaagataacctctaccgttaccacgctgttgtcaccctttgaccccgtcgtttgggaccgtcggcgcgcgcttgaactattcaactttgactatcgtatcgagtgctataccccgaggccaagcggcaatacggttacttcaccctgcctatcctcaatcgtggtgaaatcattggccgtacagatgccaaaatgcaccgtaagcaggggattctcgagataaaaagtctgcatcttgaaccgggagttaacattgggccgcgcagggtgaaggatattaccgaggcgattagccgctttgcgcgctggcagggggcgactcaggtgacactgggcaatattccgcaggtgctgaaaacgttttgggaagagggctggagtctattgccgtaagacattggcaggaggcgtaaatagaaaacggctgcagtcggcagccgtttacccgttaccaacgcgcattagttgctgaagttggcgaacatagcgataattttgtggaaaagtttcatttcttggctcttgagtaagtgtttttatgtgacattggtcacaaaaaaatcatacgcctgcctaatagaattcgcaatatccgcgcaaaaacttcttaagcccgaacagttaacggcgggtaggcgctgtgctattctctgtcaccataatgacttacctgtcgtccgttttttgacgcaagtgagtgctctaactacgcctcacggaggatctatggatcatcgtttactcgaaatcgttgcttgtcctgtttgcaacggcaagctgtatttcaacaaagaatctcaagagttggtctgtaaagcagacggcctggcctacccggttcgcgacggtattcccgtgctgctcgaagtagaagcgcgttcactctctgccgacgagatccatccatgagttttgttgccattattcctgctcgctatgcttctagccgtttgcccggcaagccgctggccgacattgatggcaaaccgatgattgttcacgtcatggagcgcgcccgcgagtcgggagcttcacgcgttatcgtcgcgaccgatcatccggatgtcaaagccgccgttgaagccgcgggggggaagtctgtatgacccgccctgatcaccagtctggcaccgagcgtctggctgaggttatcgagctatgcgggttcgccgacgatgaaatcatcgtgaacgtgcagggcgacgagccgctgatcccgccggtgatcgttcgtcaggtcgccgataacctggcacagtgcggtgctggaatggcgacgctggccgtgccgattgaagacgccgaagaggcgtttaaccccaacgcggtgaaagtggtcatggatgcacagggctttgcgctctatttctcgcgtgccactattccgtgggaacgtgagcgttttgccagctcgaaagagaccatcggcgatactttcctgcgccacatcggcatttacgcctatcgcgccggttttattcgccgttacgtccagtgggagccgagccagctcgaaaaaatcgagctcctcgagcagctgcgcgtgctgtggtatggcgagaagatccacgtggcagtagcgaaagcaattccttccgtgggtgtcgatacaccagaagatctgcagcgtgtgcgcgccttctttgccaataaataacggactcgcgctactgtgaggtggcgctaaccgactgtttgggcacgtcgttgcccgtcagcttctgccacaggcgccccaacgtttcgtaccaggctctttctgaatgagacagataaagcgactgtggcaggactttctcccacaggttgagcggtgagtctatcgccagctgattggccggtgccggaattggcgctaaaccctgttgctggaaaaacaccatcgcacgcggcagatgattggccgacgtgaccagcgcgaaaggttgatgaccaatttgttgcgccacctgctgggcttcctgacgcgtgtctcttggctggtcgagggtgatgatatccttcgcaggaacgcccagactttccgccactttggctgccgttgcggcactgctcaccggattcgtcggcgtcgccgcgccggtaaagatgagcttagctcccggattcatcaggtagatgcgtatcccttcggtcactcgaggcaaactgttgctgatgagatttgaactgggcgcccacgcagggttgtaggtatagccgccgccaagcaccacgacatagtcaatcggcccttggccgcgataggttggaaaggtattttccagcggtcgcagtagcctgtcggcgacgggttgcaggctcaacagcgccaacagcaaccaactgaccaaaaaaatgacttttcccgttttttgccttctgctgaaccagagcaggcacagtgctaccgccatcattagcagtaaaaggggtaatggcatcattaagccgccgacaaattttttcagggcaaaaaacatcagataatcggtccttttgtgtgaaaaaacggcatccgggtgagattcttggtcaggatgatttattctctgccagcctgtgccaaaatagcaccataattcgtttgtctgcctactggtaaaacaaaaagttgagcaaaaaaaaacgtacagtgacggtagaaccgtctccccagggtcgcaacttcgatgatatggcagaaaaattttcgcgcaatatctacggaacgaccaaaggacgtattcgccaggcggtgcttggagaggacctgcgtgaacttttaaccaagcttccacagcgtcctttgcgtatacttgatgccggcggtggcgaagggcaaatggcctgcgagttggccgctttaggacatcaggtattgttgtgcgatctttccggtgagatgatcaagcgggcgcaggccgccgccgccgaaaaaggtgtgagcgacaacatgcaatttgtacaatgccccgctcaggacgttgcacagtatttggaacagccggttgatctgatattgtttcatgctgtaatcgaatggctagcagaaccgcagcaggcgcttcaggctttgaacgactgtctgctacccggtggcgcactttctctgatgttttataacgtcaaaggtttgctgatgcgccacatggtgctgggtaattttggccatgtcgaagcagggttacccaaaataaaaaaaagctcgttgctgcccgactatccactggagccagaaaacgtctatcggtggttagaggaaatgggacttcagattaccggcaagaccggcgtgagagtattccacgattatctgcgtaacaggcaacagcataaacaggattttgacgagcttctggcgctggaacagcgttattgccgacaggagccttttgttagtttggggcgatacatccacgtgatggcgcacaaacccgaccggaaggacgaattatgagtgaattttcccagactgtccccgaactggtggcctgggcacgtaaaaatgatttctcaatttcattgccgacggagcgactggcttttcttctggcgattgccaccctcaacggcgagcgtcttgacggagaaatgagcgagggcgaactgattgatgcgtttcgccacgttagcaaggggtttgagcaaaccaacgaaaccattaccgtacgcgccaacaacgctatcaatgatatggtgcgccaacggttgcttaaccgctttgtcagtgaacaggcagacggtaacgcgatttatcgtttgacgcctctgggtattggcatcaccgattactacattcgccagcgtgagttttccacgctgcgcctctctatgcagttgtccatcgttgctcaagaacttaaacgcgcggcggatgcagccgaggaaggcggtgacgaattccactggcatcgcaacgtctttgccccgcttaaatactcggtcgcagaaatcttcgacagtatcgacatgactcaacgcatcatggacgaacagcagcagggtgtgaaagacgatatcgctgcgctactgagcaaggactggcgtgcggccatttctagctgtgagctgttgctgtctgaaacctcgggcacgctgcgtgaacttcaggacacgcttgaggccgcgggcgatctgcttcaggcgcatctactgcgcattcaggatgccacgctgagcggaccggatctcggtttcatcgacaagctggtttacgacctgcaaaacaaactggaccgcattaccagctggggtcagcaggcgattgacctgtggattggctatgaccgtcacgtgcacaagtttatccgtaccgctatcgatatggataaaaaccgcgtgttcgctcagcgtctgcgcctttcggtgcaaaattacttcgataatccgtggaccctcacctttgccaacgtcgatcgcctgctcgacatgcgcgacgaagagttggcattgcgcagcgatgaggtcaccggcgaacttcctccagacctcgaatttgaagagttcagcgagatccgcgaacagcttgccgccttgattgaagaggcgctgcgggtttatcagcaggacaaagtgccgctgaatctggggctggtgatgcgcgattatctcgaacaatatcctcgcgtgcgccattttgacgttgcgcgaatcatggtcgaccaggcagtacgccttggtgtggctgaagcagatttttcagggttgccggcacagtggcaggcaatcaatgattacggagccaaggtgcaggcccatgtcatcgacaaatattgaacaaataatgccagccaagctggcacaggcgttggctaattccctgtttccggctctcgacagtcagcttcgttctggccgtcatatcggtattgatgaattagataaccacgctttcctgatggattatcaggatgagattgagcttttctacagtcgttacagcgtagaacttatccgcgcgcctgaagggtttttctaccttcgtccgcgctccaccacgctaatcccacgctcggtattgtctgagctggacatgatggtcggtaaaattctttgttatctgtacctgagtcctgagcgtctggcgcatgaaggcattttcactcagcaagagttatatgatgaattgctgagtttggcggatgaaagcaaactgctgaaatacgttaaccagcgttctaccggttcagatctcgaccgtcaaaaacttcaggaaaaagtcaggacgtcgctcaaccgcctgcgcagacttggcatggtttattttatgggccctgacagcaccaagtttagaattaccgaagccgtgttccgctttggcgcagacgttcgcagcggtgatgacgcgcgtgaagcgcagctgcgtatgatccgcgacggcgaagcgatgccaattgaaagcagcttgtcgctcaacgatgagagcgaagagggtgaagcgcaggcagaccatgggccagaaggtgcagaggatgaacaggaatgattgaacgcggtaaatttcgctcactgacgctggttaactggaacggcttttttgccaggacctttgacctcgactcactggtgaccacgctttccggcggtaacggtgcgggcaagtcaacgaccatggccgcgtttgtcacggcgcttatccccgatttgaccctgctgcacttccgtaacacgaccgaagccggggcgacctcgggctcgcgtgacaaaggtttacacgggaaactgcgtgcgggcgtgtgttattccgcgctcgacgtcgtcaactctcgccaccagcgcgtaattgttggcgtacgcctacagcaggtagccggtcgtgaccgcaaggtcgacatcaagccctttaccattcagggactgccgacctcggtacaaccgactgaaatcctgaccgagaccgtaggtgaccgtcaggcgcgggtactctctctccaggagctgaaagaccgcgtcgaagagatggaaggggtgcagttcaagcagttcaactccatcaccgactaccactcgctgatgttcgacctgggcgttatcccgcgtcgcctgcgctcagcctccgatcgcagcaagttctatcgcctgattgaggcctcgctgtacggcggtatctccagcgccattactcgctcgctgcgtgactacctgctgccagaaaacagcggcgtgcgtaaggcgttccaggacatggaagctgcgctgcgcgaaaaccgcatgacgctcgaagctattcgcgtcacccagtcggaccgcgacctgttcaagcatctgatttctgaggcgacttcctacgtttcagccgactatatgcgtcatgccaacgatcgtcgcatccatctcgatggggcattggtgttgcgtaatgagctgctttccagccgtaaacagctggccagcgaacagtatcgccacgtcgaaatggcgcgcgaactgtccgagcagagtagcgctcagagcgacctcgaaaccgactatcaggccgccagcgatcacctgaatctggtgcagaccgcgatgcgccagcaggaaaaaatcgaacgctatcagtccgatttagaagagctgacctaccgtctcgaagagcagaatgaggtggttgccgaagccagcgagcttcacgccgagcatgaagcccgcgccgaagccgccgaaattgaagttgatgaactgaaaagccagctcgctgattaccagcaggcgttggacgtgcagcagacgcgcgccattcagtatcagcaggcgttgcaggccattgagcgtgcacgcgagctctgtcagctgcctgatttgaccgttgaaaacagtgaagactggctggaaaccttccacggtcgcgagcaggaagcgacagaagtcctgctgatgctcgaacaaaagatgagcgtcgcccaggctgcgcacagtcagtttgaaaatgcctaccagctggtggtgaaaatcgccggtgaagtgagccgcagcgaagcctggcaaaccgcgcgcgaactgctgcgcgactggtcttcccagcagcatcagggcgagcgcgtagagcctctgcgcatgcgcctcgccgagctggaagggcgtctgcgcgagcaacaggacgccgagcgccagctgcaggatttctgcaagcgtaccgggcaagacgtgcagccggaggatctcgacgaacttcagcgcgagctggacgtacagattgaagagctttacagcgtagtctctcaggccggtgaacgtcgcatggagatgcgtcaggagcttgagcagattcaggcgcgtattcgtgaactgactacccgcgcgcctgtctggctggcggcgcaggacgcactaagtcagttgagcgagcagagcaaagagccgctggaaagcagtcagcaggtcaccgagtttatgcagcagctgctcgaaaccgagcgtgataccaccgttgaacgcgatcaggttgctgcccgcaagcgcaaaattgaagggcagattacccgtctgagccaaccgagcggcgcagaagatccgcgcatgatagctcttgccgaacgtttcggcggcgtgctgctgtctgaaatttatgacgatgtgaccatcgacgacgcgccttacttctccgcgctttatgggccgtctcgccacgctatcgtggtgcccgacctttcccgcatccgcgatcagctcgacggtctcgacgactgcccggaagacctgtatctggtcgaaggcgacccacagtccttcgatgacagcgtgtttgccgttgaagaaatgcaaaacgcggtgctggttaaaaccggtgaccgtcagtggcgctactcgcacttccctgaggtgccgctgtttggccgcgctgcgcgtgaaaatcgtttagaagtgctgcacaaagagcgtgaaactctgtccgagcgttacgcgaacctgtcgttcgacgtacagaaaattcagcgcctgcatcaggccttcagccgtttcatcggcagccacctcgcggtcgcgtttgatgccgaccctgaagccgatatccgctcactcagcgcccgtcgcggcgagcttgagcgtgcgttaagcgcccacgaaggccagaatcagcagcagcgccagcagtacgagcaggcgaaggaggcggtggctttgcttaacaagctgcaacctcgcgttggcctgctgtgtgacgaaacgctaatcgaccgcgttgaagaaattcgtgaagaattcgaagaagcgcaggatgctgcccgctttatccagcagcacggcgtgtctctgagcaagctggagccgctggtgtcggtattgcagagtgaccccgagcagcacgagcagttgaaagaagattatgcccagtcgcagcacgcgcagcgtctggccaagcagcaggcgtttgccctgacagaagtggtgcagcgtcgtgcgcacttcagctataccgactctgccggcatgctgaacgaaaatgccgatctcaacgacaaactgcgcagccgtcttgaaagcgcagaggccgaccgaagccgcgcccgtgagcaggtgcgccagcatcagacgcagctgactcagtacagccaggttctggcgtcgctgaagagttcgttcgaagccaagcgtgacatgcttaaagagttgagccaggaactacaggacatcggcgtgcaggccgaccctaacgccgaagcgcgcgcccgtgcgcgtcgcgatgagctgcatcagtcactcagtaccaaccgtgcccgctgcaatcagctcgagaaacagattaccttctgtgaagccgagatggacaatctgcagaagaaactgcgcaagcttgaacgcgattatcatcagagccgcgagcaggttgtcacctcgaaagcgggatggtgtgcggtaatgcgtctggtgaaagacaatggcgttgagcgccgtctgcaccgtcgtgagctggcttatatgaacggcgacgagctgcgttctatgtcggataaatcgctgggtgcgctgcgccttgccgtttctgacaacgaacacctgcgcgacgtgctgcgtttgtccgaagacccgaaacgccctgagcgcaagattcagttctatatcgcggtgtatcagcacctgcgtgagcgtatccgtcaggatattatccgcaccgacgacccggtcgaagccatcgaacagatggaaattgaactgggccgcctgaccgaagagctgaccgcccgcgaacagcagctggccattagctcgaagagcgtggcgaacatcatccgcaaaactattcagcgcgaacagaaccgtattcgcatgctgaaccagggtctgcaggccgtggccttcggacaggtgaagagcgtacgtctgaacgtcaacgtgcgggaggcccattctggcctgctcgacgtattgtctgaacagcaggagcagcatcaggacctgttcaccagcaatcgtctgaccttctccgaggcgctggcgaagctgtatcagcgtctgaatccgcagattgatatggggcagcgtacgccgcagaccatcggtgaagagctgctggactaccgtaactatctcgagatggaagtggaagttaaccgtggttccgatggctggttgcgtgcagagagcggcgcgctgtcgaccggtgaggctatcggtactgggatgtccattctggtgatggtggtgcagagctgggaagacgaatcgagccgcctgcgcggtaaggatatttctccttgtcgtctgctgttcctcgatgaagccgcacgtctggatgctaaatccatcgccacgttattcgagctgtgcgaccgtttgcagatgcagcttattatcgcagcaccggaaaatatcagccctgaaaaaggcaccacttataaactggtgcgtaaagtcttccagaataccgagcacgttcacgtggtcggtctgagaggttttgcggcagaacttccggctattgaaaatagtgaggcgaatatagccgctgaaggctaattatcgtctgtaacgcttatttgcaatattgttgctccccggttgcaacatttactcgcaaaaaaaagcagcaaaatcattgctcaaataaaagcctcgaccaaataatatgggttgaggctttttgtttttattgtcgtttttttaaacattcaaccaggttgaaataataaagcagggtgtaaggctttaattcgcccagccagtaacatagagtcttcttatgactgaggaggcaattatcttgtcgacctgagcaaagttaagattctgtctatatacttaatctatgggcagtttgcttgagtattccggcagttatttcatcgtggtatttaagtgaggcaggggatgatgcttaagcgtaaagagtctctcagggtgctggtggccagtagtttattggcagcgagtattgccccattaacccagagctatgcggctgtaccaagaatgccggtccgaaccaccacgctatccagcgtgcaaagctttagtcaactgcaggccgagctgccagcgggtgtgaagccgctttacctttctacgctggcgtcgctctacgccgccaatcatatgcagcccctgtggcaagatcgggaggcggtccatcagttccagcagcagctggctgaggtggccctttccggcattcagccgcagtttacccaatgggtaagatggttgaccgacccaagagtcaccggtatgtcacgtgacgtggtgctctcagatgccatgctcggttatctgcagtttaccagcggggtcgagattaacggcagcaactggctatacagcaatacgccgtacaagatgaccacgccaccgttgaccgtgattaatcagtggcagctggcggtgcgtcatggcaccaccgagcactttgtgaccacgctagaaccgcagcatccgcagtataaaaagatgcatgccgcgctgaagcacctgctggcggatactcaagcctggccgcagatgaccagcccggcaagtctgcgtccggggcaggtgagcaatgatgtgcctgcgctgcgccagatcctgtctcgcagtgcgtcgatgatcgacgtcaccgataactctacgcctgcgcctactgcagaaactatcgcccaaaatccgaccaataataacgttgaggatttctcggtagacgaaacggccgaaaaaacccagaaaccgaccccggcggtaagtccgtcagccacgtcggtgcatgacgtattacccgctccgacgcctgatgcgccgcagggcagcacgacaacggcaacggccgcacctgtggtgatttccgacaacatttatacgccgcagctggtggaggccgtgaaacgtttccagaagtggcaaggcctggagccagacggtgttatcgggccgagcacgcgccaatggcttaacgcctcaccgcggatccgtgcgacgctgctggcgctaaatatccagcgtctgcgcattctgccgggtgatgtaaacactggcatcatggtgaacattcccaactattcgctgaaatactatttgaacggcagtgaagtactgacgtctcgcgtcatcgttggccgtccgagccgtaaaacgccgctgatgagcagcgtgctaagcaacgtggtgctgaatccgccgtggaatgtgccgacctcgctggtgcgggaagacattgtgccgaagctgatgcgtgacccgggatatctgcaaaagcacggatttacgctgttgtccggctggagcaatgacgccgaggtggtcgatccttctaccattaactggagcatgatctcacctgaccacttcccgtatcgtgtgcgccagcaggcgggctcgatgagtgcgctgggtcgttacaagttcaacatgccgagttcagattcgatatatctccacgatacgccgaatcataatctgttccagcgtgatgtccgtgccctgagttcgggctgcgtgcgcgtcaataaggcctctgagctggccaatatgctgttgcaggacacgggctggaatgatgcaagaatttcgtcgacagtgaagggcggaagcacgacattcgtgccaattaggcatcatataccggttaaattgttctatttaacggcttgggtctcagaagatggtaagccgcagtttagaacagatatttacaattatgattccaccgcgcgatctggcgcgcaaatctcatcacaagccgaaaaattgctgtaataaatgcagtaattttaacctgataactgtctgaaataccgacctgaccctgagacatccggcgaaatcaggcttctcaaagcctgttttgtccggttgactcacctaatcaaggcggttatggttgcgaggggtcagaaattggccctttattacaaccttctcttagatatagctatcgggtaattacgtttacatggaccaaatagataaatatcgtcgaaaatggctggcacttggcggtgctgccatgggtatggcgatgctcccaaacgatgcatttgccatgcttgccacaccaagacctcgtgttttggtgattaacaacctccacactggtgaaaccctcaaaactgagttttttgatggtaagcaatacaacagggacgagttggcacgactgaatcatttgttccgcgattatcgtgctggcggtcaggttaaaaacatcgaccctcaactgttcgatcacctctatcgtctccagattgcgcttggcaccaacaaacccgtacagctcgtttcgggctatcgtacgttggcgaccaataatatgctgcgcaagccgggcagtggcgtcgccaaacacagctatcacacgctgggcagagcgatggatttccacattgagggcgttgaattggcaaatatccgcaaagcagcattaaaaatgcggatgggtggtgtaggatattatccacgaagtgactttgtgcacatcgatactggacccaatcgaagctggtcctgatcctgtgcgtaatatctaatctggcctatttttaggccagattattgtggagccctatgaaatatcacattattcctgttacggctttcagccagaactgttcggttatctcctgccctaaaaccaatgaggccgcgctggtcgaccccggcggcgacgccgaaaagatcaaagctgaagttgccgcattgggcgtaacgttgactcaggtactgttaactcacggacacctcgatcacgttggcgctgccgcagaattagccgcttattatcaggtgccgattgtcggtcctcacaaagaagatcagttcctgttggctggcctgccggaacaaagccgcatgtttggtctcgagcactgcgacgcgttgacgccggacgtctggctcgaagaaggcgacgtggtgaaggtgggtgaagaaaaactgaccgtactcgaatgtccgggacacacgccgggacacatcgtctttattaaccaggcggccaaatttgccgtctcgggagatgtgattttcaaaggtggtgtggggcgcagcgatttcccgcgtggcaaccatgaagacttaattaactcgatcaaaaccaaactgctgccgctgggggatgatattgttttcctaccggggcatggcccaatgtcgacgctgggctatgaaagactgaacaacccgtttctttaaaacgtctcgacgataatgcataaaaaaagccagctcggcgtcaccggctggcttttttagtgtctaaaaatcgcttacagcacagcgacgatggcttcgcacagcggcgccatattgtctagcgtgataccggctacgttgatacgcccggaattcaccgcatacaccccaaattcggaacgcaggcgcagtacctgatctttggtcaggccgctgaaggagaacatgccgttctgctcgatgataaagctgaagtcctgcttcgcgcctttttcctgcaaggtcgtcacaaacagttggcgcatacgatgaatacgctgacgcatgtcgctcaactcttgctcccactgtgcacgcagagcagggttacccaatatggtcgcaaccacggaagctccgtgcgccggcgggttggaatagttggtgcggataaccgatttcacttggctgaatgcgcggtctgcgttttctgcatcgcgggttaccagcgtgaaggcgccgacacgttcgttgtacaggccgaagtttttggaataggagctggcaaccagcagctcgtcatgcttggcggcgaaaatacgcaggccctgagcatcttcttccagacctttagcgaacccctgatacgcgaagtcaaacaggggcaaccagccgttagccacggaaagatccgccaactgtttccattgatcgacggtaggatcgatgccggtcgggttatgacagcagccgtggaacagcacgatgtcgcccgccttggcttcactcaggcttttcagcatgccgtcgaagtccagggcgtgtttttgtgcatcgtagtaattgtattcagcgacttcgaggcctgccgaagaaaacacgccgacgtggttaggccagcttgggttacttatccagacgcgtgtcgcggtggtctgcgtggccacgaaatcagccgcaatgcgcagtgcgcccgtaccgcccggcgtttgagccgtgcgtgcacgtttgtcgcgaattatctcgctgtcagcgccaaagagcagctcttgagtgcaatgagcgaaatcgggtagaccgtcaatgcttaaataggttttagtagtctcgttttccagcaggaattgttcggcctttttaacactggccagaaccggcgtcttacctgtttcgtctttgtagacaccaatccccaagttgattttattctgacgatcgtcagcgcggaaaagatcggttagacccaggatcggatcagcgggtgcggcagtgattttttcaaacatttggatacttccatgacctgttatcaacagaaagaggcgttcaggttaccgccagatttattctttgccaaccgtttgcgagaaaaagaaagcagagttgtgagcagggcttcagcattaaagtttctgatgaaactggacaacaaaaagggcataagcgatgagaatttaccgcgaagaacggcgcatttataaaggaagaaagcaaatacggtgcgacataaaaaaggcagagccgaagctctgcctgtttctttaacctgttgctttgcccgaaggcgttgcgtttaggctaaattagaactggtataccagacccagggcaacaacgtcgtcggttgccagacccagtgggttgttgtcgtccagacggttgattttgtagtcaacgtaggtagacatgtttttgttgaagtagtaagttgcgccaacttcgtagtatttgtacaggtcagcatcgccgataccttcgatgtctttgcctttagactgaacgtaggcgatagacggacgcaggccgaagtcgaactggtactgagcgataacttcagtggtcaccgctttgttagcgaaaccgtcgttatcagtggtcaggttgttgttggtgatacgagccgcatcgcgagtttcggtgtagagagcagcgatgtagatgttgttcgcatcatacttaaccgcggtaccccagctgcgtgctttgtttttgtcttcgccgtaggtcaatgctttctgagcatcggtacggttagactcagaccaggaacctacgattcccagacccattgaagaggtgtaagaggttgacagcgcgtagccgtcaccgttgccgcgcagaacgtcgtcgccggtacggtcatttttgccctggtactgaacggcgaagtcccaaccgtcaaccagaccaaagaagttgtggttacggtaagttgcaacaccagtagaacgaccagacaggtaaccgtctgagtaaccagagtcgccgccgtattctggcatcatatcggtccagccgatggtgtcatacatcagaccatagttacgaccatagtcgaatgaaccgtattcgttgaatttcagaccagcgaagcccagacgcgttttgttgccgtcctgtgcgtcattgccttctgaattgttagcctgaacgttgtattcccactggccgtaaccggtgatgttgtcgttgattttcgtttcgcctttaaagccgaaacgaacgtaagtctcatcaccatcgttgcttgaatcgtcagagaagtaatgcagaccgtcgactttaccgtacagatccagcttgttgccgtctttgttatagatttcggctgcgttagctgcgccagcagctaacaaggctggaattaccactgcaagaatgttgcgcttcatcattattttattaccctcattggagttatttggacaccttgccactgcctacaataatttacagaactattgttgatagtttggtgtctcctgtgtctgaacgcagtgttccattgagggtgagcttaatctacatcgaaaatgctactaaacacctaattatgtttcagtaagaaaaaatgtgttactaaatattaaatttagggaactttgtgacagggatctacgtttaaaaatagctaaggccagcatcgctggccttagatttgtatctaaagttgttaaattaataactcttaaataattagaatgttgcgttacgcggagtacgtgggaatgggataacgtcacgcacgttttgcacgccggtgacgtaagcaaccagacgctcaaagcctaaaccgaaaccagcgtgaggtacggtgccatagcgacgaagatcgcgataccaccagtaatcttccttattcaggcccatttcttcaagtcgagcgtccagcacatctagcctttcttcacgctgagaaccgccgataatttcgccaattcccggagccagaacgtccatggcggcaacggttttaccgtcatcgttcatgcgcatatagaaggctttgatatctttagggtaatttttaaccacaaccggcgctttaaaatgtttctcggcaaggtaacgctcgtgctcagaagagagatcgacgccccaggagacttcattttcgaatttctgaccggattcgatcagaattttaacagcatcggtatagtcaacttgcgcgaaatctgaggttacaaatcgttcaaggcgtgaaacagcatctttgtctacgcgttctgcgaaaaatgccatatcgtccgctctttcatccaaaacggcttggaaaacatacttcagcatgctctcagccagtgaggcgatgtcgtcgagagtggcaaaagccacttccggctcaaccatccagaactcggcaaggtggcggctggtattggagttttctgcgcggaaggttgggccgaaggtgtaaaccttggacaacgcacaggcgtaggtctcaccgttcagctgtccagagacggttaagaaggcttctttaccgaagaaatcttcattgaaatcaacctcgcctttgtcggtaagcggcaggttttgcaggtccagcgttgaaacgcggaacatctcgcctgcaccttcggtatctgaagcggtgatcagcggagtcgaaacccagaagtagccgttttcatgatagaaacggtgaatcgcctgcgacagggtgttgcgaacgcgcgcaacggcaccaatgaggttggtgcgcggacgcaggtgagctacttcgcgcagatattcgatgctgtgacgttttgccgccatcgggtaagtatcaggatcgtcaacccagccaacgaccttgattgccgttgcctgtagttcgaagctctggccttcgccaggagatgccactacggtaccggtgacttcaacagaacagccggtggtcaggcgcagtacttcatcctgataattaggcaaagaattattaacgacggcctgtaacggattaaagcaggagccgtcataaacggcgacgaaggagatgccagcttttgaatctctccgggtacgtacccaaccgcgtacggtgacttcactgtcaaccgcagcacggccttgcagtacgtcgactacaggcacaacgctcatagatttctctcttaaatagttctgatgataccgatggttttaaatatgtataaaaaacctgtatgaaaaagccacacaccttaaacgaaagggttttgctatgttacttagcctttttcaggacacaagcagaaatcgccctgcgaccgcaacatttgtgccattaccgcgattagtttaaacacggcaaaacctgagagggtgaaagtggcgaaaaaatcgctcattgcgcttttctttctatatataaggagagaagaggatatagatgaagagaagaggacgcaggaacctcaattgacgttctttcgcgtcttccccacctgtgggaggggaagacggaaatgcaaaagcagtgcggatgattaggaggctttcttcaccagcggcagatcgaaagctttacgcaacgccttcacaaaagccttgtcctgacaaatggttttacccgggctgtcggacagcttggccaccggcttgccgttgcactgcaccagcttgataacaatattcagcggtttgacctgcggaatattacaggtcaggcgggtaccaataccgaaaataagtttaatccgcgtatggaagtgacgatacaaatccagcgctttatcgagatccaggttatcggagaacaccagcgtcttggtcatggggtcaatacccagcgtttgataatgggcgatggctttttcaccccattcaaacggatcaccagagtcgtggcgcagaccctgataggcgttggcaaacttggggccaaagtcacgcaggaaagcgtccatagtgatgcagtcggtgagtgctatccccagttggtccgggtattcgtcaagccacgcctgcagcgccgcgcgttggctgctagccagaaccggacttagctgctgatgcgcctggaaccactcgtgcgcctgcgtacccacgggattcaactgtagcttgtgggctaaatcgtagttgctggtcccgaccagatacgggaattcttgcttcaacgtgctgacaatcgcgcgctgcacctcgccggagaaacggcggcgggtaccgaagtccatcagcttaaaggctgaagtgtcgatatcggcagattcctgtttgaatttctgcaggttcttacgcagctgttcgaccgccatttccggcgtgacgcctggagagcgatgtttatgcaccacttcactgattaccgccagcagcggaacttcccacataatcacttcacgccaagggcctgcgatacggatatgcagatgaccgctgcgattggacacctcgacgtgtcgagggttatagcggaatgtgcgtagccattgcaggtaatcctgactaaagaaaggcagggcggaaagatagttaaattcatcttcgctcaacgccagctcgctcatcagttcaacctgatgacgaatttcctctgcgtattcgcccagcagttcgtcgccacggcaacggaactcggcgaccacgcggctatccgcgtaacgatgataaaccgcctgctgcatgtgaagcttataggcgtcggtgtctaacaacgaagtcaaaatcggggaagcgtatggggtcatgcgcgacatcctcgtcaaaagcaacaggccatactcttcgtcctggaagctgcagcggcattagttgggttcgctcaatgccttactgcaacgtcagtgacgctgagtactactcttcgtccctgaagcaactccaaaaacgttgagtatcgtgtttgttttagcctgatttaaacggcaaagttcgggaagtataccgcattatcaagtcaatgaaccctcatctcagcacaattcatcgggccaggtcgagggccaaatgtgccttgttaaggatattaaacacggatttccgaagattgttaacaacgatataacccgttaaataataatgtcttttagttaattattataaaatacatgaggttgatcgctttttgatgggcagaaaggctgactcgattcgataaaatgaaattgccgaccggcgaaattatttattggcagtgttaactgaaatagcacaaaaaagttaaagaaaggtgaaattttgagcgcaatattttttatctttatgaagcagtactgaccgctttgggcaaaagctcgccggttgccgcggccattggggtaacaatctgggaattttcaccttctgtgataaagtttattttaatcgcgtcacgcgtatcctcctgaaaacgccaaaaggttcttttatgactgaccagctgcaaacagaacaacagaccgacgcaacatcacaaccgcaggtaaaatatcgccacgattatcgtgcgccagactataccatcaccgatatcgaccttgactttgatcttgatgcacagaccaccacggtgactgcggtcagccagatcaagcgtctgggtgccgaaggcgctgcgctggttctggacggtgaagacctaacgttgataagccttaaagttaacggtcaggactggccaaactatcagctgcgagaaagccagctggtcatcaatggcctgcctgaagcgtttgagctgaaggtggttaacaagattcatcctgcgaaaaacaccgcgctggaaggcctttatctctctggtgaagcgctgtgtacccagtgtgaagcggaaggtttccgtcacattacttattatcttgaccgcccggacgtgctggcacgtttcaccacacgcattgtggccgacaagtcgctctatccttatttactctctaacggcaaccgcgttgatggcggggagctggaaggcggacgtcactggatcaaatggcaggatccgttcccgaaaccttgctatctgtttgccgtggttgccggtgacttcgacgtgctgcgcgacaagttcgtcacccgttcaggccgcgatatcgcactggaaatcttcgtcgatcgtggcaacctcgatcgtgcgggttgggcgatggagtcgttgaagcagtccatgaagtgggacgaaacgcgctttaatctggaatatgacctcgacatcttcatgattgttgccgttgatttcttcaacatgggcgcgatggaaaacaaaggcctcaacgtctttaactccaaatacgtgctggcaaaagcagaaaccgcgaccgataaagactatctgggcattgaagccgtcattggccacgaatatttccacaactggaccggtaatcgcgtgacctgccgcgactggttccaactgagcctgaaagagggcctgaccgtcttccgcgaccaggagttcagttcggatttgggttctcgttcggtgaaccgcatcgacaacgtccgcgtgatgcgcggtgcacagtttgccgaagacgctagcccgatggcgcacccaatccgcccagacaaagttattgaaatgaataacttctacacgctaaccgtgtatgacaaaggctcggaagtgatccgcatgatgcacactctgttgggtgagcagcagttccaggccggtattcagctctatttcgaacgccacgacggcagcgcagcgacctgtgacgacttcgtgcaggcgatggaagacgcctccaacgttgacctgtcgctgttccgccgctggtatagccagtccggtacgccaatcctgaccgtacgcgacgactatgacgtcgagaagcagacctacacgctgaccgtgagtcaaaaaacgccgccgactgcggatcagaaagagaagcttccgctgcatatcccactggatatcgaactttacgatccacagggcggtgtgattgagctcaagcaaagcggccagaaggtcagcaatgtgcttaacgtgaccgaagccgagcagactttcgtgttcgaagacgttgcctatcagccaatcccctccttattacgtgaattctccgcgccggttaagctcgattacaaatacggtgatcaccagctgacgttcctgatgaagcatgcgaccaatgacttctcgcgttgggacgcggcgcaaagtctgctggctatctacattaagctcaatgtggcgcgtcaccagcagaaacagccactgtctctgccgctgcacgtggccgatgcgttccgcgcagtgctgctggacgagagcatcgatccggcgcttgcggcgcagattctcacgctgccgtcagaaaacgagattgccgagctgttcgacatcatcgatcctgaagcgataagcgcggtgcacgagtcgattacacgctgcctggcggggagatggccgacgagttcctggcggtttaccacgctaatcgcctgccgtcctaccgcgttgagcatgccgatattggcaagcgctcgctgcgcaacgtctgcctgcgttatcttgcctttgccgatgcggctcaggccgacaagctggtcagcgcccagttcgagagcgctgacaatatgaccgactcgctggcggcgatgtcggcggccgtggcggcagacttgccgtgtcgcgaccgtctgcttagcgcctacgacgaacgctggcatcaggatggtctggtgatggataaatggttcattctgcaggccaccagcccggcgcaggacgtgctgaagcaggtgcgcgcactgctgtcgcatcgctccttcagcatgggtaacccgaaccgcattcgctcactgattggcgcatttgcacagggaaatccggcggcattccacgccgcagacggcagcggttatgccttcctggtcgagatgctgactgatctcaacacccgcaacccgcaggttgctgcacgtatggttgagccgctgattcgtttgaaacgctatgacgaaaaccgtcagaacctgatgcgtcaggcgttgcagacgctgaaaggtctggagaatctctccggtgacctttatgagaaaatcagcaaggcgctggatgcctgaccgcgtatttgaaggttgaaaaacaaaagggcgacagtgatgtcgcccttttttatgaggaagataaaagggttatctctgcgcgcgttttacttcagcgctcacaggctgtggtcgcagtactctttccagtacctgttcttccaactcggccagtcgtacggaaccacgacggcgcggacgcggcagatcgacctgcaaatcgagaccgatttcaccctgctcaatcaggataacgcggtcggcaacggtcaccgcttcgcttacatcatgggtcaccagcaggacggtaaaaccgtgctgctgccacagacgttcaatgagactctgcatttcgatgcgagtcagcgcatccaatgcgcccaatggctcatcgagcagcaacaggcgtgggcgatgaaccagcgcgcgagccaaggcaacgcgctgtttctgtccgccggacagcgcggcgggccactcattggcgcggtcggcgagaccgacctcttccagtgccgccatggcggcctcacgccacttgcctttgaggccaagaccaacgttatcaatcactttcttccacggcagcagacggtcatcctgaaacatcagacgcgtatcgtcgctgacctggctgagctgcgcactgccgctaagcagatcgccgctgctgcttttttccagaccggccaacaggcgcagcagggtacttttaccgcagccgctgcggccaactacggcgacaaattgccctggagaaatacgcagattgatgtctttaagcaccgtacggttgccgtaatttttaacaatgcccgccagcgttaccggcgtaccttgcggaatgcgagtcggttcactcatgcgttttctccttgttttttctggtaggctggatgccagcgcaaccagacatgttcaagcgaacgcgccacgatatcggccagtttaccgaggatggcatacaggatgatggccactacgacgacgtcggtttgcaggaattcgcgggcgttcatcgccagataaccgatgccggagtttgcggaaatcgtctccgccacaataagcgtgagccacatgaagcccagtgcgaaacgcacgccgaccataattgacggcagcgcgcccggcaacaccacctgataaaacagcgggaatccagataacccgtagctgcgagacatctccagcagtccacggtcaatattgcgaataccgtggtaggtgttgagataaatcgggaacaacgttcccagcgccaccaggaaaatcttcgccgattcatcaataccgaaccacaggataaccagcgggatcagcgccagatgcggaatgttacgcaacatctgcattgagctgtccagcaggcgctcaccccagcgcgacaggccggtaataaagccgagcaacagaccgatgctgccgccgatgacaaagccggtcagcgccctgaaggtgctgattttcaggttctgccacaggtcaccggatttcgccagcgtccagaaggcttcgacgaccgcactcggcgaaggcaggatacggttcgacaaccagcctacctgtaccgccaactgccagctggcgagtaataccaccggtaaaaaccaggggctaatgcggtttatccaacgttcagtcttgttgctcatgatgctttccttaacttttcacagcgcgcttggacacaaattcgtgggcgaccaattccccacgcggttcaatcctacggcgcagtggggtaacgctgctatcttcttttgccaaatcaaggtgtgggaacagcagttcagccacgcgataggcttcttccaggtgtggataacctgagaaaataaaggtgtcgatgccgaggtcggcatattcctgcatccttgccgcaaccgttgggccatcgccgaccagcgcggtacctgcgccgctgcgaaccagaccgatgcctgcccacaggttaggcgcaatttccagtttgtcacggttaccgccgtgcagcgcggccatacgatgctggccaaccgagtcggtgctggtcagtttagcctgggcgcgggcaatggtttcgtcgtcaatattggcaatcagacgctctgccgctttccacgcttcttcggtcgtttcgcgcacaatgacgtgcagacggatgccgaatcttacggtacggccgtgtttggcggctttggcccgcacctgagcaatcttttcttttacctgctccagcggttcaccccaggtcagataaagttccacctgttcgccggccaagtcttgggcggcctcggacgaaccgccaaaataaagcggagggcgcggcgtttgtaccggcgggtgcagcaggctggcgttcttgaccttcagatgtttgccttcaaagttcaccgtttcgccttccagcactttgcgccaaatgtgggcgaattctgccgacgcttcgtaacgttcttcgtgattgaggaacaggccttcggcttccaactcggacggatcgccaccggtcaccaggttaaacagcgcacggccgttggacaggcggtccagcgtcgctgcctgacgtgctgccagcgtcggagaaataataccgggacgcagcgcaaccaaaaacttcagtttctgggtaacggaaatcagcgaggcggcaaccagccatgagtcttcgcatgagcgaccggtcgggatcagtacgccgccaaagccaagacgatcaaccgcttgggcaatttgctgcaaataaccgtggtcgaccacgcgcgcaccttcatcggtaccgagataatggccatcgccgtgggtaggtaaaaaccaaaatacgttcagactcatgtgatattcctctttaattcaccgcgtacggtgaagcagcaatgtgagttattgaaataattttatgaaacagtcttattgcgcggcggcaggggcatgccagatgcgatccttgatctcgaccggcttcggcagcagatggttcgcatagaataaatctgcggttgcctgttgcagtttttcggttttgtcatcaacggggcgaatggtttcatcgtccggcagatgagtgaaataggtggcgatgaccttttccggcaggccggtagatttcgccaacagctgaatactctgctgttgctcggttttgatcaggccattggcctgcgtcaggacctgcaagacttcagagataaactgtggatgcgcttcggtaaacttacgcggtgcaagataaaaagcgccggtctggtttagcgtggtgccgtcgagcagcacacgagcaccgccgtgattgaaggccgcagaatagtacgggtcccagattgcccaggcgtcgacgtcgtgctgctggaaggcggccagcgcatcagacggtgcaaggttaatcggtttgatatcggtaaacttcaggccggcattttgcagggcacgcagcacgaaattgttcgagcttgagcctttctggaaggctacggtgtggcctttaaggtcggcgacggtcttgattgggctgttttccggaaccagaatcacttcagccttaggctgtggaggctgatagccgacgtacagcaagtccgcgcctgcggcctgggcaaacagcggcggcaggtcgccggtgccgccaaagtcgatgctgccaacgttcagcgcttcaagaatctgcgggccagcggggaactgatcccaggtgattttggtgttcgggaaacgtttttccagcaggtgatgactctgtgccagaatcagaccgatggagcctttttggatagcgatgtgaaacacagccggatctttttcttctgcctgagcggaaacgacgctcgacaggccgagggccaaagccaacagcggcagccatttcttgggttgcaaagacaacagtgaaggcaaacgagaacctaaaatattcattaaaattttttccaattaagcgtgagcgtgttgacgttttgcgcgagcgatagccagcgaatggcgatggcctaatgccgcaagaaacgtttccagcgaatcatccagacgcgcctgtaattcttcttccagttctgccgggaaactctggtattggccgaccagcttgtcgtgggcaaatacgccctgtagcacttcctgcgctttcagcgcgcttaataccggcttgagtgcgtaatcgatcgccagcatgtggcccgttgaacctgcggtggccagtggcagcacgaccttgtgctcgagtgcgcgttcgggcagcagatcaagcagcgtcttcagtgcaccggaaaatgaagccttatacaccggggtagcaatcagcagaccatcggcggtttccaactgagcaaccagttcttttaactgtgggctggaaaagttggcaaacagcaaatcttcggcggcgaaatcttgcagactgtatgacacaacttctacgcctcgggcgctgagccactgttcgctgagagcaagcagggcagatgaacgtgacggctgacgtgggctacctgcgagtgatatgactttcattgtgctcccttataactgtaagttatataaccaacaaatttgttcagaatttggattaaattaacaggcgatagcttatgacaggaaatctaaattccgggaattcttagaccaaaagtggatatgagccgaaaatcagccaatctttgcgcatttgctgtgacgtggatgtattaaagaagaaaacaaaaagaaaacgtttgcctggattaccgatttttgacgggaatcaattccaattagtgatggcttagccgataataccgcccgactggccaccagccattagccaccggacctcaggagaatccatgtattatcccttcgttaggaaagcacttttccagctcgatccagagcgcgcgcatgaattaacgtttcgccaactcagccgcctctccggttcgccgttcgagtttctgattcgccaatcggtgccgagcaagccggttacctgcatgggactgaacttcaagaacccgctgggtctggccgcaggtctggataaaaacggggaatgtatcgacgcctttggtgcgatggggtttggattcgttgaagtgggtaccgtaacgccgcgtgcgcaggacggtaatcccaagccgagaatgttccgcgtggttgaggccgaaggcataattaaccgcatggggtttaacaaccacggcgtcgataatttagtcaataacgtcaagaaatcacacttcggtggcgtgctcggtattaatatcggcaagaataaagacaccccggtcgagaacggcaaagacgattatttaatctgcatggagaaggtttatccttatgccggttatatcgctattaatatctcttcgccgaacactccgggactgcgtaccctgcaatatggtgaagcgcttgacgatctgctcggttccatcaagaataagcagctcgaacttcagcagcgtcatcagaaatatgtgccggtggcggtgaagatcgcaccagatctttctcaagaagagttgatccaaatagccgacagtctggtccgtcataatatggatggcgttattgcgaccaataccacactggagcgtaatttggttgctggtctgaattatggcgacgaggcgggcggattgagcggccgtccggtgcaaatgcaaagcacccagattatccgcatgctgtccgcagaacttaaaggcgcgatgccaattatcggcgtcggcggcattgattcattaacctccgcgcgtgaaaaaatggcggcgggtgcatcgttaattcaaatctattccgggtttatctatcacggcccgcagctgattaaaaatattctgatgcatatatagttactgctcacactaattttgcaaacaaagcttggtcggggctttatttctgccccggcctcgtttatattttcttaactgagcgtttaatgtactaccccagtcattatctctcttgcggcaaggctaacctgcgatttgtcctatatagaggttaccgagaataatgttaacgttgggcaatggacaataggataacgaaatgaaaatcaaacctgatgataattggcgttggtattttgacgctgaacatgaccgactgatgttggacctagccaatggcatgattttccgttctcgttttcctgctaaaatgctgacccccgacgcgtttgccgaaaccactttttgcgttgatgatgcggcgctctatttcgacttcgaagagcagtgcaagaaaattaaattggctgctgaacatcgtgccgaattagtgcttaatgctttggtcgcttatcgtttcctgaaaccgctgatgccaaagagctggcattttactcagcagcatcgtcctttccagcccgataatggccagcttgccagcgtcagcgtgacggagtccggcgagcaggcaacgctgctggtggtagagtctggtgataacgccagcctgtgcttgctggcacaggagcgtctgaccgtagccggtcgcggcatggttttaggcgatgcgattaaagtgatgcacgatcgcttaatgccaatttctattgcttcggaaaatatttacgacagggctgtgtaatttctcaaccccacgtttctttatttttatagcctttttattccaatattaaatccgtcaccggaacgcagctgcacgagaggatcttgccctgtttgccgatggcgctggacgttaatgccgtcacttcgccctcgatcacgtttagtttgcagctcccgcagattcccgcacgacacgaataagggatgataaatccctgttgttcaagctgttccaacaggacttgttgattgttccccttgaaagcggtgccctgataagtaatggcgacctcctgtgcggccgtctgcgacagagagaccttctccagcacgtcgccggcgcgatagacacgggcagggtgggttgccagcacttctacactgtcgcccgcccgaataatgccctcgtttcgcgcaatcatgttctgcccgaaatcgatgctgccggtttcagaagtgcgataaccttgcagcgttttaagtggttcaccggcgggatgctttctgccgcgttcggtgctgatggtgatcagcacgcagcggctacagggttttaccaaatcaaaaataacgctgccgacgcgaatggttttccaggtgtcttcggcataggcctcagcgctggtaacgaccagattagggcgaaactgttcgagcttcacgctggccggacagcgttgctttaggtcgtgcagcgaggcttcattaatgagtaaataaggaaagccgtcggcgaaggagagcggtacctggggctgattcttaacgcgacgagtcaactcgggtccgacccagcgcatctcaacctcgcgtttaagatagccactcagccattggttgatattttttggcgcagtcagggcggtgaaatggctgccccacacctcggtctccagcggctgtggattgaagtcgctgaattttatacagacgctttcgcttccatcgggagaggttaaaattaatccatcggggagcaaagcgggcgtaaactgaaccagttgggagtcttttcgggcggtaataaactttccctgcgggtcggttagcataaagaggcgatcgaaggccaagccactggctgtaacctgagcatgcgacagttgcagaccgcgcatggacttgacggggtgaacgtataatctcgacagggtaatcactttgggctccaggccgcgccatcagcaggcctttaacaggatgcttatgatgcgggataggtctctttttgaatagtaaccagagactttatgacaatcttgcagtattagctataatgcgcgctcttttgtccgcagaacttgaatcttcacgtcaggaactcagggcactccttgcctgattgatgggtagggctgtttttaattgtaggaaataacttctaggtgattacgtcaatatgaactctttgtttgccagcacggcgcgtggattggaagaactattaaaaagcgaacttgaaacgctgggtgcgcaggcctgcaaagtggtgcagggggagtgcattttgagggcgacgatcgcctgatgtacaagagtctgctctggagccgactggcatcacgcatccttcttccattaaatgaatttaaagttcatagcgatctcgacctttatctgggcgtgatggcaattgactggccgtctatcttcggcgtagaaaaaaccttcgccgtgcacttcagcggcctgaatgacgagatccgcaacagccagtacggcgcgttgaaggttaaagatgccatcgtcgacagcttcacccgcaagattgaccagcgtccaaacgtcgcaaaacagcagcctgatattcgtgtcaacgtcttcttgcagcgtgatactgcaagcgttgcgctggatctcagcggcgaaggtctgcatcagcgtggctaccgtgatctgaccggtcaggctccgttgaaagagaacctggcagccgcgatcgtgatgcgttccggctggcaggtcgggacaccgatggtcgatccgatgtgtggttccggtacgctgcttatcgaagcggcgatgatcgcgggcgatcgtgcgccgggtctgcatcgtcagcattggggctttaccgcctggtctaaatttgatgaagcgctgtggcgtgaactgaccactgaagcacaggtgcgtacgcgccgcgcgattcaggaaaccccttctcgcttcttcggttctgatatcgaccgtcgtgtcatcgagatggcgcggtccaacgcccgtcgtgcaggcgtggccgagctcattagctttgacgcggcagaagtcggcaagctgaaaaatcctctgccggaaggcccggtaggtacgctcatcagcaacccgccttacggcgaacgtctcgagagcgaaccggcgctgattgccctgcataacctgctgggtcgcatcgccaagacgcagttcggcggttggcagctttctctgtttagcgcctcgccggagctgttgagctgtctgcagctgcgcgccgatcgtcaattcaaggcgaagaacggtccgctcgaatgtgtgcagaagaactaccagctggcagagaatcctcaaggcacagcaggggcgcagattgccgaagatttcgctaaccgactgcgtaaaaatgttaagaaattggaaaagtgggcgaagcagcagggcattgagtgctaccgtctgtatgacgccgacttgccagaatacaacgtggcggttgaccgctacggcagcaaaattgtggtacaggaatatgcgccaccgaaaacgattgatgcgcaaaaggcgcgtcagcgtctgtttgacgtgatcaatgccacgctgtcggtgctggatatttcatccaaccagttggtgctgaaaacgcgcgagcgccagaaaggcaccagccagtacgagaagctggcgcagaagggcgagttcctgatggtcgaagagtttggggccaaattctgggttaacctgaccgactatctcgatacaggcctgttcctggaccaccgtattgcccgcaagatgctgggcgaaatgagtaaaggaaaagacttccttaacctgtttgcttacaccggtaccgcaagcgtacacgccggtctcggcggcgcgcgcagcaccaccacagtagatatgtcgcgtacctatctcgagtgggcagagaaaaacctgcgtgccaacggcctgacgggtcgccagcatcgtctgattcaggcggattgcctgtcatggatgagtaacgccgatgaacagtttgacgtgatcttcatcgatcctccgacgttctccaactcgaaacgtatggccgaaagttttgacgtgcagcgcgaccatttggcgctgatgaaagatctcaagcgcattttacgtcgcaacggcaccattatgttctctaacaacaaacgcggattccagatggatcttgagggtctgagcaagctgggtctgaatgcaaaagagataaccggccaaacgctgtctcaggattttgcccgtaaccgccaaattcacaactgctggctgctcactcatgccggcgaggaaaaataaagtctatgtcgttaattagcatgtcaggtgcatggctgtccttcagcgatgcccccattttagacaacaccgaattacatatcgaacctaacgagcgcgtctgtctggttgggcgtaacggcgcgggtaaatcaacgctgatgaagatcctcaaccgcgaagtgccgctggatgacggacgcattgtgtatgagcaggacctgattgttgcgcgtttgcagcaggatcctccgcgcaacatcggcggcacggtatttgacttcgtctccgaaggcgttgccgagcaggccgagcatctcaaagcctaccacgcgatttcacatctggtcgaaagcgacccgagtgagaagaacatgaacaagctggcgcagattatggagatcctcgatcaccagggtctgtggcagctcgacagccgtatttcggaagttctgctgcagctgggtcttgacggtgataccgagctttctgcactgtcaggcggctggctgcgtaaagcggcgctgggccgtgcgctggtcagctcaccgcaggttctgctgcttgacgaaccgactaaccacctggatatcgaaagtatcgcgtggctggaagagttcctgaaagagttccagggcagcattatctttatctcccacgaccgttccttcatccgcaacatggcgacgcgtattgtcgacctcgaccgcggcaagctggtgtcctatccgggcaactatgagctgtatctgaccagcaaagaagaagcgctgcgcgtggaagagctgcaaaatgccgaatttgacaagaagctggcgcaggaagaagtgtggatccgccagggcatcaaggcacgtcgtacccgtaacgaaggccgcgtgcgtgcactgaaagccttgcgtcgcgagcgctccgagcgccgcgaagtgatgggcaccgccaaaatgcaggtggaagaagcggttcgttcaggcaagattgtcttcgaaatggaagacgtcagctacaatgtgtctggtaaacagctggttagccatttcaccgcccaggttatgcgtggcgacaagattgcgctggtaggcccgaacggctgtggtaaaacgacgctgctcaagctgatgttaggtcagctcgaagccgacagcggccgcgttcactgcggtaccaagctggaagttgcctacttcgaccagcaccgtgccgagctcgacccagaacgcaccgtgatggacaacctggcagaaggcaagcaagaggtgatggtcaacggccgttcacgtcacgtgctgggctatctgcaggacttcctgttccacccaaaacgcgcaatgaccccggtcaaggcgctatccggcggtgagcgtaaccgtctcctgctggctaaacttttcctgcgcccaagcaacctgttgattctcgatgaaccaaccaatgaccttgacgtagaaacgctggaactgctggaagagctgatcgacagctaccagggtaccgttatgctggtcagccacgaccgtgaattcgtcgacaactccgcgaccgaatgctggatctacgaaggcgacggcgtgattaacagctacgtcggcggttatcacgatgcgcaccatcagcgtaaatcccagcgcgtgctgcgtcagtctgcaccggtagagactaaagcggcggcggcggtaaaagctgagccggtaaaacgtactgcgaataaactgagctacaatcaacagcgtgagctggaacagttacctcagaaaatcagtgagttggaaacacgtatcgaagaactcggcaagcagatgagtgacgccgacttctttacgcgccctcacgatgaaacccagcaagtattgaatgcccttgccagtgccgagctcgaattagagcaggcgtttgagcgttgggaagcgcttgaagcccagaaaaacggctaaggttgcgtcttggctttaccgctttcccagtgaagggaaggcggtaaggttttcggttttccccgtgtttcgccattgaggagttgaatgtgtgttcacactctcatgacccgcacatactgtgtcccgactgtgatttattggtgacgctgcccgcactgcaatatggccaaaaggccagctgtcctcgttgtaaatctacgctgaccacgcgctggaaagagccgcgtaaacggccgcttggctacgcgctttgtgcactcttcatgctggtgctggcgaatatgttctcgttcgtgaacatgaacgtcaaagggctgaccagccagataaccctgattcaaattccgcaggtgctggtggcagatgactacgccagtatggcgtcgctgtttatgattgtggtccagcttattccggcattttgtatgctggcaatcgttatcctctgcggaagagcgccgctacccagggcgtggaagattcgtatcgcttggatcctgttccaccttaaaccctggtgtatggtcgagattttcctcgccggcgtattagtgagctttgttaagcttatcgcctacggtgaagtggggatcggcaccagctttattccctacgttttgttctgtttacttcaggtacgcgcattccagtgcacagaccgttactggctgtggaatcaggcggcaccgacaccgacgattgctcagcctttacgcgttgggcaaagcggcctctcgcaggggctgcgctcctgcgaatgctgcatggcgatactgccggcaaagcagtcagtgtgtccgcgttgtaccagcaagggacatgcgcgtaagcgctacagcctacaatggaccatggcgctgctggtgacgtcgctgatgctgtatatcccggccaacttgatgcctatcatgattacccagtcactgggaaccaagatgacctcgaccattatggcgggcgtggtgttcctttggggagagggctcttatccgatagcgatggtgatttttatcgccagtatcatggtgccgtcgctgaaaatgttggcgatcgcctggctgtgctgggacgcacaaagccgcaaacgggtcgaccgcgagaggcagcacgtcatctatgaggtggtggagctggtgggtcgttggtcgatgattgacgttttcgttatcgcggtgctctcggcgctggtcagaatggggcagttaatgagtatttatccagatatcggcgccttgctgtttgcattggtcgtgatcctcacgatgttcgccgcaaccactttcgatccccgtttgatttgggatcgctcaggaacctttgataataaggagcaacgcgatggcggaaaataaacacacccgggatgaaaacacctcgggtgaagccgaagtcgggagtatcaagcgctggtctccagtgtggataatcccgatcatgaccgccctcatcggcggctggatcctgttttatcactttagtcatcagggaccggaggtgacactgattacctcgtcggcggaaggcattgaagccggtaaaacgagcataaaaagccgtaacgttaacgtggggcaggtcgaaacggtcagtctgagcgctgacctacagcaggtcattatcaaggcacgactcgattctggcatggaaaaaatgctcaagaacgactcggtgttttgggtcgtgaaaccgcagattgggcgtgaagggatttcagggctcggcacgctgctgtctggcgcctatatccagcttcagccgggatctaaaggcgaagagaaagagcaatacaagttacttgacgcaccgccgttggcttctccggacgcccagggtattcgcgttattctgaccagtgaccgtgccggtcagctaaatccaggcgatccggtactgttccgcggcttccaggtggggacggtggaaaccagccacttcgacccgcagtcgcgtaagattcgctatcagctgtttatccgtgcgccatatgatggcctggtgaccaccaacgtgcgtttctggaaagagagtggggtgaactttgatatgtcttctgccggcattcgcgtcgaaatgggctcgctcaccacgctgtttagcggtggcgtcagcttcgacgtgccagacggttgggaagccggtaacaaagccgacaacagcgcgtcctatgccctgttcaacgaccagcgcagcattcaggactctctgtataccaaccataccgactatgtgctgttcttcagcgattcggtgcgtggtctgcagccgggcgcgtcggttgagttccgcggtattcgtttgggtacggtcggccaggtgccttatgagaagttcggtatggcgagccagatcgacagcggttacagcattccggtcttgattcgcatcgagcctgagcgtttcaacaaactgctgggtaaaaacttcaacatggatgaacagcttcaggcggcgctcaagcatggtctgcgcgcatcgttgaaatctgccaacctgctgaccggttcgctgtacgtcgatctggacttctaccctaacgccaagccttggaccggaccgaagtctattgatggtcaggcgctgttgccgacggtgagtggggtctggcacagatccagcagaaactgatggcaaccctggataagatcaacgccttgccgttgaatccaatgattacggaagcgaccaagacgctggcgcagagtcagaaaacgctgcaatcgacgcagaaaaccatcgactcgctcaacgccattgtctcgagcaaagagatgaagaatctgccgcaggatatgcagaaaacgctgttgcagcttaatcgcagcatgcagggcttccagcctggttcaccggcctacaacaagatggtcgatgatatgcagcgtctggatgaaacgctgcgtgaactgcagccagtgctcaggactctgaatcataagagtaatgcgctggtattcgccgccccagggcaagatgatcctcagccgaagaaggccaaataaatgatgaaatggatacctgtcgtcttagcgttgttcctggctgcctgtagcagcgacggtaaaaaaacctattaccaactgccgactgtcaacagttcggcaccggtagcggtggtgagtgcaggcggtgggctaacgcctgccgcacaaaaaccgaagctgtggatttctcaggttagcgtggccgacttcctcggtacctcgggtctggtttaccagactaacgacgtgcagtacgtgatggcggccaataacctgtgggccagtccgcttgaccaacagctgcagcagactctgcaaacctacctcggccgcaatctgccgggttgggttgtatcaggccaacaggccagtgatggcaatcaggagcagctttctgtgaacgtaacagggttccatgggcgctatgacggcaaggccgtcatcagcggcacatggacgcttacgcgtgatgggcaggtcagccagcataacttcaatatcgagctgaagcagaatcaggatggttatgatgcgctggtcaggaccttggcgacgggttgggaacaagaagccaacagcatcgccctgcaaataagataaattctttttattagttcgataaaaaatcccgcttcctggtcattcaggggcgggatttttttattgacgatcaggtgcctgaggctttagctgcgcgattagcttgcgcgcaatcaataaagatagcgcaatattgtgacagtggcgtgaattttgcgcattgacctacgggagaatcggggctatttgttaggtgtggacgcagttaagcggacactgttttctttccacttgacctgaataatgagggacacgaggcatgaagagacaaaaacgcgatcgcctggaacgggcacaatcacgtggataccaagcaggtattgtaggacgttcgaaagaaatttgtccttaccaatcgctagatgcgcggtcacactggcttggaggttggcgagaggccatggaggttagggcagttaacgcttaagtctacccctgacagtaaaaggataacctccgcaatttgacagcaaactgcggaggttttttacccttcatatctggaatttctgctgcgttggcgtctctgatgcccccagtcacctacttttgtttgtgtaagctcctgaaattcactctttcgccatgttgcctaaatccaaaattacctgggtaacgctttattttttagaaagcggcggtgtctttgaacagacccactttcaggtcagtggcggtatagataacttcgccgtcaaccaacacttcaccgtctgccacacccatgatcagtttacgattgatcacgcgtttgaagttcagacgataagtcactttcttagccgttggcagcacctgaccggtgaatttcacttcgccaacgccaagtgcgcggcctttgccttcgccacccagccagccgagatagaaaccgaccaactgccacatcgcgtccagacccagacaaccaggcatcaccggatcgccgatgaagtggcatccgaagaaccacagatcgggattgatatctaattcggcttcaacataacccttattgtggctaccgccgtcttcggtcattttgacgatgcggtccatcatcagcatattgcccgacggcaatggtggtccacctgctccgaaaagttcgcttttgccagaggctacgaggtcttctttcgtataggattcgcgtttatctaccatgttgtatgtaagccttattttgttgaagcacgcatcttagctaacagctgtaagccgaacaagtccgatcagctgtgcgaaaaccaatttaaccagcgcagtggccacggataacgagggcgctcggataaggttgcctgagcaatcctctcctgaataagtcccaacagcgtcgggctttcctcgttttcctcttgattcgtaaagagtaaaccggtcagaataggcagcgcatcggccgcattctcaaccgcccacaggtggaacttgccatcgcgaaccgcttcaataacctgcgggtgcaggcagagattgcgtacgttagccgtaggaataatcacgccttgcttgccggtcaatccacgacgttggcaaacctcgaagaatccttcgattttttcattggccccgccgataggctgtacgttgccgaattggtcaaccgaacccgtcaccgcgatttgctgattgataggctgcatcgccaacgcactgatcagcgcacacagttcggccagcgaggcactgtcgccatcaacctcaccatagctctgctcgaacacaatcgaggcagagaaggggagcggctgatcgagctccagttcggcaatcaggaaggcctgcataatcatcatgcctttagcatgaagattgccgccaagctctgccttacgttctacgtcggtgaattctccatcaccggtatgcacaacgcagctaatacgtgaaggttcaccgaaggcgcgcggatgccccggatattccagcaccgacaggccgttaatttgaccaatcacttctccatcggtctcgatcagaatctgacccagctcgatttcatcctgcatacgctcctgaagatagctttcacgccatgcgcgggtcgaaatcgccgcgtcgaaagatttggcggtgagctcaggatcgtcattataaagctcggcctcgctcagttgagccgagagccaggttgggcaaaggggcaagcagccctgatcgccactaaagcgcaccgcagccttgaacaactcaggccatgcgtcggcggcaaggcgcgggatctcgagttcgtcggccaacgtattgacataggcacaccatttttccatgtcgtcattgtcggccagaggcaggtcagcttcaaactcaccgtagaacgccgactccagcagttccggctccatatcattcagctcgcccagagagacgcgatcgccaaccaggataagcttaacgtctaacggcatcggcggaatatttaccggcagcgggcgtgtttcatcgggagaaacccaatggtagctttcctgggtgatcatctgcttaaggcgcagccacagcaacggctgggccagcagcgagcggatagacaggatcagtacgccgccattaacctgatgaattaaaccgggctgaagctcaatctggtccttatagatgcggacacagccaaagagttgctcgggttcaatccattcctgataaagacagctcgacgttccgctgaaaggggccgttgggtcctgtgcgggcagtacctgaacgtgacgtccgtcaatctggtactggctgccgacaatttcttcagcttctggcagcaggtcgttaacgacagaggccagacgcgagagataatcgcgactttcctggcctttgaccgtcataaaacgcgtgcgcgaattagggaagcagaaaagggaaagtccattctcaagacgaggctgaataagggaaaaatcgaccggggccaactgatccgctgtagcaaaaattgtctggtatggcgtagagtccggcagtaagagctgccaatcaagtcggttattggtcaatgtgttagctgtagtcttcaaaagggaaagggcgattatacaagaataagccgtgctgcataccacgagagtcacggttagcccatgcagatgtgacattatgcagtttatgggtgaaatttaaccacttacctctggtaatgtcgtgacatatttagggaaaaaagtgacataatgctgctatgcttatcaacgttagatggtcacagaagagcctgcgatgaaatatcagcaactggaaaaccttgagagcggttggaaatggaagtatctggtaaaaaaacaccgcgaaggtgaaaggatcacccgccacatcgagaacagtgcggcgcaggatgctgtggagcagcttctccgattagaaaacgaaccgatcaaagtgctcgagtggatagataaccacatgagtaaagcgctggataatcgtctgaagcagactattcgtgcgcgtcgtaagcgtcatttcaattcggagcatcagcacacgcgtaaaaagtctatcgatctcgagtttctggtctggcagagactggctgccttggcccagcggcgtggcgttaccctgtcggacaccatcattcagctgctcgaagatgcggaacgcaaagaaaagtacgccaatcaaatgtcttcgctcaagcaggatcttttgcagatcctcgacaacaaagaaagctaacgcgatccctttatgcgtctggttacaccccgcctgctgttttatctctttttacgccataaaaaaaaccccgcaatgcggggtttttaaagtcaggtctatcagaagatagcgctattacttaagcctgtggctgagtaacaacgtctttgatacctttaacttcgatttctacgcgacggttaggtgcgaaggctgcgatctgagctttagtagcacgaccagatttgtaaccgaagctaccggtcagctgatctgcttcaccgcgaccctgtgcagagatcttgttagaagggatacctttagataccaggtaatccactactgattgagcgcgttgctcagacagtttctggttagatgcttctgaacctactgggtcggtgtaacccagaaccacgactgaaccgtctttcggatccagtgagctcagctgggtgtacagctgatccagtgcctgacggccttctggtttcagagtagatttgccgaaggtgaacagaacgtcagacttcagagtgaacttgtgagtctgaacaactggagctggagctggtgctggagcaacaactggagctggcgcttcaccctggccgaaacggtaagaaacaccgacagacagagttgcgttatcaggacgtgcacccacggtagcagcatcaccgatgttgttaacccactggtaatccagacgggttgcccagtttttggtcagtgcgtattcgaaaccaactgcagccagtggagaaacaccggtgtcgttgtcgcttacgcggttgccgttgccaaagttacctttagcgtctgcacgccaaaccataccacccagacgagtgtagatatccagatcgtcagtcagtgggtagctcagtttagcagtcagctgaacgccttgtgctttgaatgcgccgttgtttacgctgcctttgtaagccatacggccaagccagtcatatcccagttcgaagcccaggtatgggttcgcttggtaacctacaaacgcaccggcacccagttggctgtcgtgagttggaccgttgccaataccattgtaagcattagcgaaaccagtatcgtgatactgggaccagcccaatttaccaccggtgtaccaggtgttatcttgcggtgcggcttgcgctacggtagcgaaacctgccagtgccactgctaatgcgatagctgtctttttcatttttgcgcctcgttatcatccaaataggcaattgagctttaagctttaagcccttggttaaattccttcgtccaagttattgcttcacttaggtacttgccacttttcgtaggcattataagagcaaccttggcgaactaaagtctacaacgtggcgagaaagttacaagcttgatgtgattacgctcaggaaaaaaacgggaaaatgtacacatttcttaacatcatagacaaaatgttgacgaaactatgtgtttttaaacctcaaaaacacccgtttttactggctccggcgcgataatcagcacgaatcactaataaacggattatttttgtcagattactcctaaattgaattaatggtacacggaggaatgaatttttactgctggaggttgtccggcacctgaaaatcgatcttccaggggcttcatgatgaagccataagatcctccggtttctgcagcgacttgtaatcttttgcgatctgagtcacttaattctggcagccaaccgagtactacactgtagttacctgttaataaagcgcgctccatggcatcgacggatgcaataccttcaagctgactcacctgaactatcttgtccacgggtaaacccgattgggccaaccagcgacggctcagtttttgggttggagtaagccaaagcagccagcgagactgtgcaccgagatggtggagcagcggtaagagcaattgcgtcaaagctggctgattttcactatagacgaactcgctcagtaagccactgttagccgttgaattttggcatattggcgtcgcgtttgccgataaaggatgctgactgaaatgagaatgatgacgatgatgagttcgcatagtgttgttccaccagttagttactgtacggatatacagtactgtgcatatggcgagagatcaacctaatttttccaagatatctcgcaactcttgaagttaatcgtcgagaaagagagtttagatttggctgcgtaagagggtttgagtattttgcttaaagggttcatgtagtatcaaatctcacttcgtttgaattaagcgataaggaaatcaatatgttaaatgaaactaaaaaaaagattgctcaatccatagctttgttatcacctttgggtgtgattcattctcggcctcaattcgggggtacagcctgtcgtacggtgatgcgatgtttgcgctggtggcggacggagagctgtatctgcgcgccaccaatgaaaacgaagaaataatgaggcagatggctatgcggcagtttgtttatcacaaacgaggtatcgagatcctgttgcgctattttcaggtgggtgagtcactttggcagcagcctgagcggctgattaagctggcgaatgatgctattcgggggatgcaaattgaaaaggcagcgaagaagaacgatccgaggaggctaaaggatttgccgaatatcaatttatcgatggagcgaatgctgtggcagattggcgttaaaaattccgccgaacttcgaatgcaggggccattaaaacctacgttaaactctgctcagtgaaaaaggtgccgggcatccttacgctatttgccctcgaaggggcgattctggggtatcacatgtcggtgttgcccgtcccgtcgcgcgccagattgaccgactggtttaatatctttactcaggaagagcagggataagggcctagcgtcgggccagcggaaaacacaggttctccgctggccttgttttagcggcttgagcgcttaaacgttaagtcctttcccggctggggcaattttattattaaggctggtcatttcaggaatatgttccagcagtagcctaatttgttgcagaactagttgctctttggtgtccgacgccgtcgttttggcttgaatacgttcggagagcgtatgaagcaattctttgacctgagagtcatctgtcccttcatgatgcagtgcgctatcgacatagcgcgttgcatcatcaagcagcgtcaaggtttcactgtcttcaagcttttcgcggtgtgcgcccagcgcggatatatagctgagcatggtgtgattcaggcacagcaggcggaaagccgcgtcaagcgtgtctctgtcgttatctttctcggaggtcatgttcgagacaaccgacgccaattctgcgtcacagttatgtgcatcccttctggcaatacgatattcaagaccgttgtctttgccctgatgatactgaaccaaaatggcatccagatagcgacagttagcataaaaggtcttgttaaccaccgtcggtagctggcgaaaacgccagtcgggccagataaagctgacggcgaaccaggcaatcagacaacctattagcgtgtcgatgattcggggtatggcaacctcgaacccttgtcccatcagattaaacagcagcagcgccaacagcgtgataaacatcgtggcatgtgcgtattgcacgctgcgaaaggtgaaaaacagcatcccgcagatgacgattaaaatcatttgtccttcgagagaaggaatgaaatacagaatcggcatgcctaacgcgacgcccgctaatgtgccaacaacgcgcagcgccaatcttcttcgcgtggcgctatagtttggctggcagacgaacaggctggtcagcaggatccagtagccgtggctcagtccgcttatctgaataaacgcatagccaaaaagcagcaccgcagacatacgcaccgcgtggcgaaatagcgcagactttggcgtcagatggcgcgaaatacgcagccagatatcctgaaatccggtgagtttgtcatcggcaaaggttttaggtccggcggtcgccgcttccgacagcgcctgctctgactcgatgttagacaattgggcatctatggcgcggaggtttttaatcaggtgacgtaatgccttgataagacgactgtccgggctgagcgccatctgacgctcgatggcctcacccagtcgaacaaaggcgcgctcgaacagtggattgtgctgatatttttggcgataaagaatgcactgtgaaagctgctgacaggctaccgactgcatactcatgagtctttgcagacggaataaaatatccgtgtggtgaaactgttcggaaagccgctgatagttgacgtgaatcgaactggcgcgttcgtgtatatcctgtgccacaaaataatattgcagcgtgcggcgggttcccttctgaccgcggtcaccctttaagcggctctgcaacgcggttttggtctcattcagcgtggtcactaactggccgttagccatcgccagattgaccagctgtttgctgttatcaccttcttgatcggggtcaaacagggtggattttgcatccagatacaccgccagtttctgatagcagcgtgaaatattatcctgtagtgggcgaatcggcaaaagcacgtgtccagtcagcgtgagcaggtaataccatacggtacccgtcaacagcagcgcagattgctcataccagacctgataaacgttattaatgccgagcatggtatagatggcaatcagcagcgcgccaaaggcgatggtggcataacgttgtcctaacgcacccaacagaataaagccacaggtagacagcgccagacccacggcgaacagccacggatgaggaaaaagcagtactaccgacaccgaggcgacaaagaaagagacaagtgtgatcagcaggttacgaaggcgacccgctagcctgtcatccagatcgcttaatccggccgctacgacgccgagcgtgagcggaatggtcagtttaggttgagaaagtagccagggaccggcaacggtccccgcaagtgcgataaaaatacgaatgctgtacagcaaattactgttgtaagcatagcgtctcaaacctggcgcaattgaaagcacggagtactccagcaagaaggtaaattataggttcagcggatacgtccgttatttcttaaacgcgcggcgctcgcctctctggcctgtttcgccatctcaacggacaccacgcgtctgcccactggccacagggctatcgcggcaatcttgaagttggcgatgccgaccgggataccgatgatgctgatgcactgggcgatgccggcgataatgtgagacagacacagccaccagccgaagaaaatcagccagaagatattgagcaaggtaccgctgccagaaagcagcacattgcgtttttcaggatataattcatcaacgtgtaccgcttcattaccaaaaggcaaaaatgaaaggcgggtgatttcccagcaggagcgggtcaggggcagcgtaaaaatcagcacaatgctgaccagagtggcaaacagccaggcgagagtggtgaagaaaccacccaacacgaaattgagaatgttcagtacagtacgcataaaaagtcccgtctttgatttaagctttccaacgccattgcgttacgtttattcctactcttatgtattctactctgtttttggcgctggagcgccactgcctatcgcaggtaaactccctttgggtatcgctcataaaattaaaaaacatggcgcattaacatggaactgaaatcgacatcatttggcaagcatctggcacagcacccttacaatcgggtgcggcttctgaacgcggggtcgaggtcagcggcgataagcatcattatctgattccgtttaatcagctgattaacatccgctgcaagcgcggcatcgtctggggcgagcttgagttcgagcttcccgagcagaaggtggtccgactgcatggcactgaatggcaggaaacacagaggttctaccatcatttgctgaaggtatgggagagctggagtcaggagatgagtgaggtcagtgcgggcgttttacagcagcaggttgaaaatattacccgcatcgagcagcaggacagttggttcaaacgttcacgtctggccgaggtgcagacaaaaattaagcgtgcctttgaagcgataccggttccggtggaaaggcttgtcgaattcgacaactgccgtgacgattatgaaacctgcctgcgctggctgaatcagggcgctcaaagcgtggttcagcgcaatctggcgtggactgagcaggttatcagccaaaatcgtgacttttttgacagcgtcgagacctcgccgctcaatgacagtcagtgtcgcgccgtggtgaacggtgaggacgcggtgctggtgctcgcgggggcgggcagcggcaagacgtctgtgctggtggcccgggctggttggctgctgcgtcgtcaggaagcgctccccgaacaaattttgctgctggcgtttgggcgacaggcggcagacgaaatgaacacccgcatcaaagaacgacttcagattgacggtattaaagccaaaaccttccacgcactggcgctgcaaatcattcaggaaggcagcaagaaagtccccaaaatcagtaagctcgaaaccgacagcaaagcgtgcagaagcctgctggtgaaaacctggcagcagcagtgcgcagaaaaaaagcgcaggccagcggctggcgtcagtggttaactgacgagctcgagtgggacgtgcctgagggcgactattggaaaaacaaggccttggccgaacggctggggagtcgcctcgaacgatggctggggctaatgcgctcgcacggcggcagccaagccgagatggttgagcaggcctctgacgaggtgcgagagcttttccaaaaaagagttcgcctgatggctccgttaatgaaagcgtggaaagccaaactaaaagaagaggacgccgtcgatttctccgggcttatccatcaggccatcaatatcctcgaaaagagccgtttcgtcagtccgtggaagcacattctggtcgatgaatttcaggacatttcgccgcagcgtgcacggctattgtccgcactgcgtaagcaaaacagccagacggcattgtttgcagttggggatgactggcaggcgatttaccgctttagcggcgccgagcttgagctgaccaccgcgtttgcccatcactttggtgaaggcgcccagtgcgcactggataccacttatcgctttaatgacagaatcggagagattgccaatcgtttcgtattgcagaatcctcatcagctaaaaaaaccgcttaacagcctcactcggggcaataaaaagaacgtcgtcatactcccggaagaccagattgagaaactgctcgacaagctgagtggtttcgctgaggacgacgatcggatcctgattctggcccgttatcatcacttacggcctgaagtgctggaaaaggcggcgacgcgttggcctaaactgaatctcgattttatgaccattcatgccagcaaaggtcagcaggcggaatacgtgataattgttggactgcatgaaggcaaagacggtttcccggcagcggcgcgtgagtcagtgatggaggaagtgttactgcctaaaccagaggattttgccgatgcggaagagcgtcgactgctgtatgtggcgatcacccgagcgaaacatcaggtctggctgatgcaggacaaagagcgaccctcggtatttattgagcagttagaggcgctgggggtgcccacgcagcgtaagccgtaacggttaaaacgcgtcgcccacatcatgcgcgacgcgtttattctgagattatttcaggcggtcctgcagataacgctgataatctgggatgctgatttcaacatcctctttgaacaggggagactggattaggaaatcggcggtcgagcggttgttggcgaccgggatattccacagggtcgccagtcgcagcagagctttaacgtctgggtcatgagggacggcattcagcggatcccagaagaaaatcagcacatcaatcttgctttccgaaatcaatgcacccacctgttggtccccgcccatcggaccactcagcatgctggtaaccggcaggccggtattttgctgcaccagattacccgtggtaccggtcgcgtagagcacatgttcgccaagctgagccttgttggcatctacccagctcagcaggttgtttttacagtgatcgtgcgcgactagggcgatatgtttttgttttgtaatcgtgcgagtggtgtattccatcagcctggcctttgagaaaagtatgactgatagattacttaaactcggattttcagggaagcataaagcggggaaatgtcgtcaggcaggccttattcgtgacaattgtcagattactgagcagaaaaccatttcgccgtcgtactgctccgagtgtcatgttgcaacatagaccacagagaaaatgagaggtaaacctcgctggcattgccctctattcgagctgattctggcctctggttgctggcgttaagcgtcatcgcgctttttttcgacagcgcaaaggcgggtattgaggcactctggcccgataaattatactggttcatcgcggcttcaaggctcgtggcatcgtgagttcgtagccccgtaagccggtcctgtcgatagtctatctgattccctttttcgtcgattaaagtgatattcattttttggctgaaatcacgactttcctgttcggttgtcaaggaaggtaaacggatgctgaccgcgtgcaaattcctgacatcaaaggcgacaatgatcggcggggagtgataaaccgcggtcacctgcggaagggtttgcttatctgaaataatatctgatgctgccctgcatctaactccagactgtctgcgccctttaaaattggccctgaaaccagtcttccatccacaaccaggagatcgacttctggcgatagcttaaggcttaatgcgtaagcgggcgctatcaggttagccataaaaataccggcaaccataaaaccaagattcatctttctctccagacctcaataactcactctctcattattgaatattgcttatattgtgtcaaagttttacaaaatgtatttttattcctggcgatgaaacaactgtcttctcaatttgcgaggtgaaaacaccttcactctggtcagactggattacacttaggaaaccttatcgtgaaggagataaatccgtgcaagacagcgaagtcagtcaaattctaaagcaaatcaaaacaatagccctggtgggtgccagcgataatccttcccgtcctagttatggcgtcatgcaatatttgctcagccaagggtacgaggtcacgccggtcagtccaaaactggcagggcaaacgttactagggcagaccgtagtggcgacgttagaggatattaaacacccgtcgatatggtggacgtgttccgtaatcctgaagcggcctatggcgttgctcaggaggcgattgcaatcggggccaaggtgctgtggctacagctgggagtcattaatgagcacgcggcggtgctggcaaaagaggcagggctcaaagtcgtgatggaccgatgcccgaaaattgaaatcccccgccttgggctgtcgcattaaggtatgagttaaaccgcatgcataaaaaaaccggtcaatgtggaccggttttttctattgagggtaacctcaaattagttgcgcaggcgcggtgccagcagctgactgcgaacggactccgccaaatcatccagcgaactttgttctggatgtgcgatgcgcgcctcgtggtcgatttgaatctcggcgagataggtatggaccggctgaccttcatcatcttccatcacaacgtgataccaggggcggcacgcattttatcgtcggcttcaatctcgctgaccgcaggtttctccagcgaatattcggcatcgacgtcgataacgacgcccagataacccaacattctgtggcgcacctgctggccaataccatacttgctggcgaccccatatttgcttgctaacatagcgacctcctcaaaatagcatcttgaaagagatatggggcctaatcggcaaaaatcaagccgtaaccaggcaggcaaaccctttcaggtacaggccttcaggatacgcgccggtcacgggtggtcggcggcctgacggaattgctcaacaaactgaatctcgcgacccgcatcgagtgcggcatcggccaggatcttctggaacagatcggtcggcaacagccctgaacacgagaagctcagcaagatgcctcccgggcgcaacagctgaatggccagcatgttgatgtctttataacccgacaagcgctggccagctggctcttgttctctacgaacttcggcgggtccataacgatcatgtcgaactgttcgccctgagcgcggtatttgcgcagcagctggaacacgtcatcacgcacgaattccgcttttgtcaggtcaagtttgttaagctcaacgttctttttagcaatatccagtgcgtcctgggaagtgtcgacgttagtcactttctcacagcccccatcagtgcggagacggcaaatgcaccggtataagagaagcagttcaacactttacggcccgcggcatagttacgcgccgccagtcggctgtcacgttggtccagatagaaaccggtcttgtggccgcctttgatatccaccagcaggctcatgccgtgttcctgaatgggcagcaggtcaggtggagtttcgccgagaatcagaccctgagtcagctcaaggccttctttcttacgcacggctacgtctgaacggtcgtagattgcacattccggataacagtgttgcagcgcgctcagcagggcggcacgctgatattctgcacccgcagacagcagctgtaataccaggaaattctggaaacggtcgatggtaatacccggcagtccgtcggactcaccggcaatcaggcggtaaccgtcaaggccgtcacgtttggcaatccagttacgccaggtttgtgcctgctgcaaacggcggatgaagaaatcgatgtcgatagcttcgtcctgcttaaagctccagacgcgagcccgaatctgagactgaggagaataggcgccggtggcgagccattttccctgattgtctacaatatcaatagtatcgccggaaagtgcctttccttcgacgcgaagtaccgccccggaaaacacccacgggtgacgacgaagaagggatttttcacggcctttggccagatacaaacgtgcagtcatataattaggttcaatcagtctggagacaaaaaagagcgacattgtccgagcatgaagcagagaatgcaacggatctcatcgctatgaggagataattatgccaaaaaccagtatagccgcttacgtctatggccgagtgcagggcgtcggctttcgttatgccactcagcaaaaagccaaagcgctcggcttgaccggttacaccaaaaatctggacgacggcagcgtcgaagttgttgcgtgtggcgagcagcaggaaatcgatcaattactcgagtggctgaagcagggcggtccgcagtatgccagggtcgataaactcttaactgagcctaaggcgctggtagaatttgaaggattcagtattcgccactgattccagaatcgccagcctgcgctgttagatacattttaccggttttggcagtccggctattttggttgcctgcttggctggaccttcagggaataggcgatagagatagcggctgttgcctttctcttccccaagcttttgcgccatggcttttaccagcatgcggatagccggagaggtattgaattccaggtaaaagctgcgcacaaaattcaccacttcccagtgtgcgtctgtcagaacaatgccttcttggcttgccagaatcggggccagcgcttcgtgccagtctgcgctgtttttcaggtaacctttggcgtcggtctcaataacctggccgttaaactccaacatataacctctaacttcgaaatcttgaaagcagggcgcaagtttagcaaaaaagcgcctccagccaaagaaaaagccccgcctaaggcagggcttgataactgggccggtaataagaaactatcagttgctgcgtgatgacaggcccagaatactcaacagacttacgaacacgttgtaaagtgaaacgtagaggctgactgtggcgcgtatgtagttagtttcgccgccgtgaataatgttgctggtttcccacaggatggcaccggcggagaacagaataaacaggcaactaatcgccagtgacagcgccgggatgtgcaggaatagattggcaacgaccgccaccagcagcacgacaaagcctgccatcatcattcccgacaggaatgacatgtccttacgggtggtcagcacgtatgccgaacagcagaagaacaccagcgcagtcccccgagagccagcatgatgatgttacctgcgcccgctgcgagcagtgagctcagcaacggccccagcgtataacccataaaaccggtcagggcgaaagtgcacaaaatacccgcagggcgatcggccatgcgataggtcaggaacatcagcccataaaagccaactatcgtcagcagcatgccgggagacggtaacatcagtacggtgcttgctgtggcagtaattgcggagacgccgagcgtcagcgccagcagaaaataagtattacgtagcactcgatgcgtgctgagcaacgagcccgcgcgtgaagaagaagaggcaacgatacgatccattttttaatctcgcttagcgacagaattgaagtcgatgaaaaagcattcaggatgagataatagagagttgctcctggctcacaaaggaggtttacccttctttaccccctaagccggttctttacgcttaatgaatcaggaaagcagagataccccattattcgcggtcaggaaatcgacaaaaggcgctaaaatgacgataaaatcagcacttgatgcgcgaaaggcggtttttcaggcaaatgaatcaattccggctttacaaggtgatgggctatgtttatagtgcgttccgttgcggaggggtggccgagcggctgaaggcaccggtcttgaaaaccggcgatgggaaaccattcgagagttcgaatctctcctcctccgccataaacaacacaagaaagctgctaagaaattagcggctttttttgtgtctggaatttgggggctgtgtaaacaaaccagcccgaaggctggcttgagagccatgcgggcgcagccgaatttttgactggcaccccacaggcggcaacaatgcctccataggcagcccccatttcaaccactcaaaaaagcctattcattcagtttcttaatttctcattcagtttctcaagttattttgagaatgcgcgaagcattgccccacgccacggcgtttctctccgcgtcggtcagcctggcttttctgatccagtcggtggccactgcagtattctcgaacggataatctattgagaacatgacgttttcttccccaatgagtccagcgcacagcgaagggcagggtcggagcatacacctgaggtagtaatcacgatgtttctgcgcgcgtaatgcgacggtggatgctgcaaggtatatttcagattggcggtggcgatgcggctgtcgagacgccacagttggataggcagcgtttcccccatgtgtcccaggataatttttgccccaggaaatctatcgaaggtcccgctgaatatcaatctcatcgcatgactgcatgtttctaccgcccagctccataccggcccccacatctcagggtgctgggtgtacatatgcggataatcaggcggatttccgggatgaatataaatcggcacttcaagcgcctgcacgcgttcccagaaaatatcatagcggcgatcgtcgaggtaaagtccatccgtttcgccgttaatcatcgcccctgcatgttaagatctttaacgcatcgttccagttcatcggcggcggctttggggtcttgcattgccagatgggcgaatccgccgtagcgttttggattccgctgcatctcggcacccagacgatcgttggcgtattttgccagccgtacggcttttgccgcgtttggctcaacctgtacacccggcccggaaagcgagagcacggcaaaatcgaccccattagtctccatgacctccagacgcccctgaccaaagtctgagagaatcggcaccactttatcgaacaacgacgggcggatgttttgccgcgtttcgcccagatagcctacaaactccggcagcataaaatgttcttcgagcgcgatgatacgcctcggcggttttacaccgacctttgtctcgtctggcgttgccgcctgactgagtgaagtgcttgccataagcgcggtaccgctggtggccatggcggtggcggcaacggtggcctgacgtaaaaaatctcttctattggtcatgataaatttccggcgtgaagtcgattatttaaggggatgggcaaattaagaaacgaaattcgtttcttaattaaatatacgactccactaaccggcgagtaagggacaaagcgtaaaaggatgtaacgacttgaggaaagggctgacgatctagtgcggcagtcccagcagcggtgccattaatgtcagtgcctcgcgaacccgcgggcgaatatcaaattccggcacggcaggcagaatacccagcgcaatatcacgcagggcgggagcaatgatcagcgcctgaagatgttttgcgccattctctggccagccagcggcaatcatccccgttgtcgtaaatcttgcagccatgcatccagcatcttgccagcattgtcgatgccgctttcacgatagaggttcaggaagtgtgttttctgatgggggaattttgcagaaacttgaataatgctaccgatctttccgaaagagcgcgtgctgcgaggtcgacaaaaaactgctcgagaatagcgatagcgtcatgcggtttttaggcagaggaagatgataaagggtaaaggtggaagaccagtcgaggatgattttttctaaaacgtcggtgcgattgctgtaaaaccggtaaaacgttttcttggcaaccccagcagtacgcgcaatctcgtcgacagaaagtgcctccacgtctttttggagcagcagttgaaaggtggcattttggattttttcgacaagttccgcttcgggaacggccggtcggcctctgccggagaatgctttgcccgagtttgtcgactgtttgttcacttttcatccttttagctaatcacgacattgtatgtcgtgggcaagaccttaatcaattcacattaagtcattcattccactgatgatgatgtgttaagtaaggggcggatttatcgacgctttttgtctgctaaatcagcaaataaacgccgggtgaagtttttgcataaaaaaatggaatttacgtctgtttttcaagcaaatgaacaacgtcgggctttacatcctcatcccctaagtttatagtgcgttccgttgcggaggggtggccgagcggctgaaggcaccggtcttgaaaaccggcgatgggaaaccattcgagagttcgaatctctcctcctccgccataaacaacataagaaagctgctaagaaattagcggcttttttttcatctgtactttttaaaacgctctcatccagactctctctcctgccgactcagcgccaatctccttctgtatcaagaaaattccggtacactcaacgttcactgtttcgtaataatctttactcttcattcgattgaggtgggcaatgggaccgagtgtcgatctggtaccttcttctgagcatttccccgtcgaggccgaggtcgtggtgattggcggcggtattgtgggtatcgccacggcattagcgttagtgaagcagggtgtgaaaacggtattgcttgaaaagggcaccgtggccgccgagcaatcgagccgcaactggggctggtgtcgacgtaccggacgcgatattcgtgaactgccgttaatcaacgccagtatgcggttgtgggaaaccctgaatgaaaccaccgggcgtgagaccggatttcgccgtcacggcattatttacgcgactcgaactgaagcgcagcgtgagcggcatttgcgctggatagcgcaggcaaaacagtatgatattgcgagccagatactttccccaagccagttagccgagcggatacccggtttgaaggcgaactttgctggtgcactatttactgaagcagacggtcgcgctgaaccgcaaaaagcggcacctgcgatggcgatggccgctatggaagcgggtcttaatctgcaacaacactgtgcggtgcgcagcattgaacgtagcgccggacgagttagccatgtcgtgaccgaacacggcgagattaaatgccagtcggtggtggtagcgggtggggcctggtcacgtttgctgctgcaaggctgcggtgttgaaattcctcagttaaaagtgctctctaccgtgctgcgcacgcggccgctggaggccgacgtttcttcctgcgtcagtctcggcagtgtggcattgcgcaagcggcttgacggcggatggactgtcgccagttcggcctccagcgtggttgatatcacgccggattctctgcgttttatgagaccgtttatgcccgctttcaaggttgagcgcgcgtcgctcaagctcagatttgggccacgttttatcgaagaagcactctattggcgaccggggcaggccgataaactctcaatttatgaacgtatcagagtgttggatcccgcgccggatcgtgcgctactgcgccagatgattgttgatcttaaacaggttctgccggcgttttccggtgtacaggtggcgcaaagctgggcaggtctgattgacaccctgccggatgccataccggtaatttctggtatcgacaagattgccggtctgtttgtcgcaacgggattctcggggcacggttttggcatcgcccctgcggcgggtcagctgatggcagatttggtgcagggcagcacgccgattgtcgatcctgccccgtttcgtttttcacgctttaccgacggtgaaagggtgcacgcgcagcactggctgtaagcgtgcctcatttatcgttagccgccgctgcggcattgcgccacagcagcatgctgccttcagaatgtccggtcaccggatcggtctggggcagcggaacttttgccaccgccttggtgcgcgccgccagttttgaaggttcatcgtgacataaatcggcggagacgttcggcggataagcccccaccatcataaagttatcgtcggccgaaacctgcctgtgcccgactccggcgggcagcagcagcacgtcacccacgttaacctcaattatctcgcctttcgctcctcccagttgcagcttggccgaaccggaaaaaacgccgagcacttcggggtgttgctgtggaaatgcgtgaaggcataaacaccatagcgccactgtggcggccagccgttagcgctgaaaaggtgctccagatagctggcgttatcgaccgtatcggggggatcacgcggtgataaatcacgaccggaagcggactgttggggacgccgccctcaggcttggtgatatgcaaaatttccattgccacctctcttggttcggcaaaactccaccgtggcaacgccagcaacggcataaaaccgacaagagtacaaaagcgacggcgattcagcggcattggcactgctccttgtccacagcgttcgttggtctgattcaattaaatggcgagctaagcgcgatcgagagaataaatttctcagccagcataaatctcaatgagttatcttcatcaggtatagaacaaaagcgttggaatatcacgaaaaaagcggcagcaatggcacgattttaagacttcgagggccatatttatcagaaaaaactgaattcgggcctcaatcaacaaataaaagttctataaatttgattaacgaccattttcttctaggattaaaaggacataaagcacttctggaggagaagtcatgaataagaaaatgttgattatggttgctacagcggtttcggtacttgcgggttgtcagacttatgaccgcgcggcaagctatgttaaagatccggtcgtaagtgacgttaaagtagggatgacaagagcacaggttcgtgcgattgctggcccaccgtcttctgaaattacccttattcacgcgaaaggtacctgccagacctacgcggttgcgccacgtgatggcaaggcgcaaacttatttcgtgagtcttaatgacaccggccacgtgatgaataaaggtttccagacctgtgccgattacgacaaagaccctcagaccggcagctaatttgcctcagcccgtttgaaataaaaaacctgcatcgttgcaggtttttttgtaggttctctaaagcattacgccgtttgtgtgacgatgcggaccccgactttactgacgcgattgccttccatctctgcgatggtccaggtgaggccgtcccattcgatatggtcaccaataaccggttccccgcccagcagctgaatcacaaaatggcccagcgacagcgttttgtcgatactgtcatcgagattcaacccgtacagctgagagatagcgtctagcggtgcgtcagcctcgagaataaagtcaccgaagaagcgctcgtccatcaccaccgcattggtatcgctaaacagtttacccaactccggcaaatccttttcctggccgataacgcagagaatgtcgccttcttttaatcgcgtgctgccggtagggtgcagcataaccgtgccgcggaacagggctgcaatacgggtttctttcggcattttcaaatcgcgcagcgcggcgccgacacaccacttttcggatccaagctgataaataaagtgctcccactgggtgtagatatcaatatccaggcccaggcgagaaatcggcgtcggcgcaggagggataatcaccttggccttttttgccgcaaagccaagcgaagttccctgcaacagtaatgaaaccagcacgataaagaatgcgacgttaaagtacagatgcgcctgcggcagcccagccatcatcgggaatacggcaaggatgataggcaccgcaccgcgcagcccgacccacgagatgaagaagcgctcgcgcagggtaaagtttcggaacggcagcaggccgacaaacaccgacaacggtcgggcaaaaagaatcatccacaaggaaagcgccagcgccgagaccgcaataggcaacaggtcactcggggtaagcagcatcccgagcaccaggaacatcgcaatctggctaagccacgcaaggccgtcgaaggtttgcatgataccgtgtttgctgcgcaccggccgattaccgagcatcagaccgcagagataaaccgctaaaataccgctgccgtcgaggccgaccgtggccgcaaagaccagcagcccaccactgaatgccagcatcggataaaggccggtgggtagggttacgcgattgatgagctgctgtaacagccagccgccgccgagtccgaaggcaatacctagcccgaactggcgaataacatcgaccaggaacatccagctgaggccgtgttcacctttggcaatcatgtcgatcagggtaatggttaggaacaccgccattgggtcattactgccggattcaatctccagcgtggcgctaacgcgttcattgaggcctttgccgccgatcagcgaaaagaccgccgccgcatcggttgagccgatgatggcaccgatcagcagtccctgcataatattaatgtggaacaaccatgccgctgccataccggtgagaccggcagtgataagtacgccgacggtggcaagtgagagtgcgggccaaagtgccacacgaaacgacgaggcgcgggtgcgcatgccgccgtcgaagaggatgacggccaaggcaaggttgctgaccagataggcggcagggtagttatcaaaggcgatatgaccaataccgtcgacgccggccagcataccgatggccagaaagatcacgagaatagggatgccgaggcgtgaagaaagcgagctaagcagaatacttgctgctaccaacagtgcgccgataaaaaaaagtgtgttgatagtactcgcatccaatgtgtctttctcctgtacgtattacggctttcttcctgtcactgggtcaatgactataatgttaatttaacaggaatttgtaaacggcgctgtgtaaacttcggatttttattaagcgatacgttaggttaataattccccatcgcgatgttctctccaccaattgattcccccgcgcaaatccctaaaagccatcgaaaagctatgcttattattatccaaagagaaaaggggtaaaggtatgagtcaatttacgggaattcatcgcgaggttttgcaggatggcaccatcaagcatgtgctggttcgcgatgaacaaggcaacaaacaggttaaagccgccaaggactatatttccgaaggtattcgcccacagcttgatgacttgccagaggtcggtacggactctgagtttccaatagacggaaaaggatgacggtggggctttggattgtaaaaattttttgagatttaaaaagaaaaaaaccagcggttaaatcggacgggtggaccgaataaccgctggcgatcatcaaagttgatgagctaaggagaaactgaggtcgtcagttatcttttaatgcagtatctgtgccaataacgctaacctttctgcttttcaacagcgcgttgagcaagatagccccaaacgttgcggcgcctatgccgcccatggtgaagccaccgaaggtcagcgaaaagttgccagcccccagtacaagcgtcaccgcgaccataatcaggttaccgttctggtttaaatcaacgttattttgtaaccagatgcgggcaccggcgacggcaatcaggccaaagaccacgatagacgcaccgcccaataccggccctgggatggtgtgaatcaatgcaccaaatttgggagagaagcccaacaaaatagcaaccaccgccgcagccacgaaaatgagcgtcgagtaaatcttggtcactgacatcacgccgatgttttccgcataggttgttaccccggtgccgcccatcgaggcagaaagcatggtcgccaggccgtcaccgacgaacgcgcgtcccagataagggtcgagatttttaccggtcattcccgcgacggctttgatgtgcccgaggttttcagcaatcagaataacggctactggcacaatcaacagcatcgcgtggctgtcgaaaaccggcgatgtaaagcttggcatcccgaaccaggcggcatgcgtgatgccgctaaagtcgatcgattttcccaggccgagcacgttggtgatgacaaaatagataatgtaggcggcaataagccccaatagcagcattagccgttgcatcaatcctcgcgtaaataccgctacgccgccgatacacagcacggtgacgacggccatccagctgtcgaacattgaggccgcgacgctgccgacggcgatcggtgccaggttaaggcctattgccatgacaatcgcccctgtgacgaccggcggcatcagtttctcaatccatcgggttccgaccgccatcaccacaaagccaatcagcgtatataccgcaccgcaggcgataatgccgcccaatgccagggcaatattgggattcggtccgtggccgctgtagccggtgacggcgataacgacccgacgaacgaggcgctcgaccctaaataacttggcacgcgcccgccgacgatgatgaaaaatagcagtgtgccgatgccggacatcaaaatagccatgttggcatcgaagcccatcagcagcggcatcagcaccgtagcaccaaacatggccaccgcgtgctgaagtcccatgatgatggtcggccccaagggcagccgctcatccggcgctattaccgccccttccagactgcccgttcttttacgccattgaggaaaccacgtattcgccatcatcttctccaggattaaaacagaggaaaacggcctgaactcaggccgatgttttttgacgcatcaggggatgatagcgtcggtcaaaatagaccaatccatggctgtcatcgctgcgtaaaatatcgatgacttcacaaaataaaacgtcgtgggtgccaacctgcgtcacctgactgacgcggcagtcaaaggaggtcagtgcgccctgcaacgcgggagaacccgttgccatcgttagccactgtgcggcagaaaaacgtgcctccatcggcgtcttgccgccgaacaggttggacaacgactcatggaggtccgacagcgtattgacgcaaagcacctgattctgctcaaaaatcggataaacagaagccgagcgattcaggcagactagcagggtcggtggcgtgtctgtgacgctgcacaccgccgaggcggtaaatccggcgcgtcctgcgggtccgtcggtggtaataatgttcaccgccgaaccgagatgcgccatcgcgtcgcgaaatgcctgtttttccacaccagccagctcggccaggggaggtccttaagaggtaatgtcatgatgagctccgctggggccgtagtcagataattttgcacacgcgatcgaaggccagacgcggtgcgcgagggtaaaccttgccactgtcgccgtagccgatattaagcaagaaattggctttccaaccttgctcgctcaggaaagtttcgttgaccttcgcctgatcgaaaccagacatcgggccggtatccaggccgagcgagcgcagggcgaggatcagatacgccgcctgtaggctggcattacgaaacgccgtctcgtgcgctaattcaggactggaggtaaaccatgagcgtgcatcgccgtgcgggaacagctccggcagcaggtcataaaacgccggatcgtaggccagaatcgcggtcacaggcgcgctcagggtcttctccagattgccgctcgacagcgcaggtgccagcttctctttactttctttagtgcggataaacactacgcgcagcgggcagcagttggcggaggtcggccccatacgcgctaagtcgtaggcctgctgtagcaactcgtcgctgaccggtttatcctgccatccgttgtgggtgcgggcttctgtgaacaaggtcgccagtgcgctggtgattaatgcttcggccatgatgtctccgttggctgtgagctctcggcagacggcggggcaaagcgcagcagccattcgagaaggattgggttaaaggtttcactgtcggtcacactcatggcgtggccgccgtacgacatctgcaccagctcgccgttgggcagattatgcgccagcgtcgtggagcagtgccacggaaccagcaggtcgtctttgcagctaaaggccagcgtcggcgtatttaggatatcgaggctgccgctgaggtccgaagacatcaatgcctgtagacggtgcagcaggttttccattccctgaaaatgttcaacctgatgggtttgttcctgttctagcagctcggcgtgtgccgaaagccagtctgcgggatataaaaacagcggctgcgcccgaacgtaggcttccacgccggtgttaagcagcagatcctgacgcacctgaaaacagcggcgagtctggctgtcaagcgtcgcccagccgttaatcaccaccagactctcgagcaatgccggataacgctgcgccagatgcaggccgataatgccgcctagcgcgtggcccaccacgtgacaacggtcaatcttcagtgtattgagcagaccggcgagctcatcggccatatcctccatacgatagcccgcgggatcgtaccctgacttgcgccggtgccaaactggtcataaaccaccacgcggaaatgctgctcgagcatcgccagctgcggtttccaaaagctgtgtacaccgcctagcccggaagagagcaccacggtttgcgccgtgggcgaggtgttgccgctaattttgtaaaacagggacgttttgctcatgccattctcaccgtctgatttcggaaaaactagtggcctacgtgagcgattgaggcaatttctaccagtgcctcaggtttcaccagaccgcactgaatgcagaaacgcgcgggtttttctcccggaaaatattcggcgtaaaccttgttcactgccgcgtagtggctccagtcagtgatgaaaatggagttgaaggtgacgtcatccatggtgccgccagcggtttcaattacccctttgatgatttccagcacgtggcgagtctgtgcctcggcgtcgccgggaaacacgacgttattgttcttgtcgaaaggcagcgttcccgagacgtagacgacgccatcggccttggtgcccggaacgaatggcgcaatggggacgccggtgccttcagggatgatgatgctttttggcatagtgctttcctttttaaaattaattaaagattttaatttctcaggccgtttggctcattttttcgctggttttcgcgacggtattacagaaactgtcgacgtttgacacccaaccaaagaaggtttcgatgttgtagatagcggccttctgagcaaactctgggcctgcctggtgggtggcatcttccagcaccacgccgaagtactcgaggaagaagccgtcgcgcagggttgattcaacgcagacattggtggcgataccggtaaataccagatggtgaatgccatagctgcgcaacaggctgtcgagctgggtgttgaagaatccgctgtagcgcgtttttggcagcacgatgtcacccggctgcggctgaagttcgtcaaccaggtcgtagtcccaatcgcctttggccagcagtttgcccatcaactcggggcgtttgcgcatggtctttagggcattagatttatggaagtttggtgaaccttcgccgccagcttcgacgtactggttatcccaaccgttctggaagaaaataaccttgatgcccgccgatcgcgcggcggcgatagcgcgcttgatgttggcgataaccggtcccgtgtgcgagacgtcgaagcccgccaagtctaggtagccgcccttggaggcgtaggcattttgcatatcaatgacgataagcgcggtttgctgcggtgagaacgccagcgattcaggacgtgcgggcaaaatgacttcgccgttaatagcgcccggatctcgacgaacaacggcattttctacaattttcattatgcgacctctttttcgacggatgtgtcattgagcaggtattggcgcgttttcatcagcggctgaatgaactggccgaagttttcgataccctgtacgaaatcgtcgaaggtcagaaggacgccctctgtgcccggcactgtcgcaatttcgtcgagcatttttgctacgttggcgtaagagcccaccagtgtccccatgttgatgttcactgccgacgtggggtcagccatctgacgcacgttggtatccgcgccggatttggtgtctttgctgctctggtcggtcagccacgccagcgcttcgctgtcggctccctctttataagattcccatttggcgcgcgcggcggcgtcggtttcgtcggcgatgaccataaacagcacgtaggaggcgacgctgcgtttctctgcgtcggcggcggttttcatgcgcgcggcggtggggcaaaagcggtcggtgtgttgacgcctttaccgaagcagaagttgtaatcggcgtgtttggccgagaaggccattcccgcatcgctctgaccggcgcagataaccttcatctcggcctgtggacgtgggctgacgcggcagtcgtccatcttgaagaatttaccctgcatatcgcagtggcccgtgccccaaaggtcgcgcagcacggtgacgtattcggtcaggtagtcatagcggctgctgaaatactcatcgcccggccacatgcccatctgctcgtattctggtttctgccagccggtcaccacgttaacgccgaagcggccgttggagatggaatcaatggtggccgccatgcgggcaacgatggcgggtggcatcacaagcgttgccgcagtggcgtagagcttgattttgctggtcacggcggccaatcctgccatcaacgtgaacgactccatgttgtgttcccagaattcggttttgccaccgaatccgcgtaatttgatcatcgaaagggcgaaatcgaagttgtagtgctcggctttctgcacgatggttttgttcagctcaaaggttggctgatactgcggcgcgttttctgaaatcaaccagccgttattaccgataggaatgaagacaccgattttcatagcacacctcttgtttgataaaggcccgtctggcctctggaacatggagcgtttaacagcgaaagcctggcttgagtgcatcctgcgggttcctaattgcgccaggctaatcgcttactcgtacactgacattgcaatctcaatgccagtttttaaatcacctttattatcaatgtcttaaaaaagttttttgaaatggggtagagcaaatggtctaaagtggaccatttggtaaaaaataactgcacgaaaatcaggcagggatgagcaaaaatggtgcggaaatgttaaattttgaatgaattttcagcatttctccctgggggagagaggcacgggcatagtcgcagtggggagttttgttatgcttgagcgaaagcgagactgacaggaagagagggtgaagaattggcagcagatggactgaccggcagcaagaaggcgccgacgcggcgttcacgcgccgtcgcggcaaagcgaaacaccattatggccgccgcgctggaattcttttctttatacgggctccacggaaccagcctcgacaaagtggccgagcgtgccgacgtctccaagaccaacctgctttattatttcccctccaaggaagagctttacgtcgccgttctgaaagatctgctggacatctggctcgaaccgctcaaggcgctaagccccgagcagcagccgatggaggcgataaaacagtacatctatcttaaactctgcgtctcgcgagaccatccccaggcatcccggttgttctgcctcgagatgttgcaaggggcgccgctactcaagcaggtgctgagtacacacctcaaagtgttagtggatgagaagtctgacattattcgtggctgggttcaggccgggcaaatcgcgcctatcgagccgcttcatttgctgtttatcctctgggccaccactcagcactatgccgacttcggcgtacagattgaggcgatcagtggacagaccctcggcgacgaggcgttcttcgagcaggcggtggctaatcttcagcacatcattacgcagggtattcgaccgcagggttgaggttagacccgcaacgggaaatgcccataccgacacgccgatgggcattttttagggttaaaatgatgaaatatcgaagataaaaaaaatccggcgcaaaatacaccggattttttatgccgatttcaggcggccattatttcactgcggcgcgctttttagaacgcagccagtagcctatccccagaatgacaaaccacagcggcgttgccattaaggcttgacgggtgtcaggttgcagcgtgagcagcaccagcacgcaggcgaagaacgcgatacccacccagcacatcagaatacccagcggcattttgtactcagaagcagcatgcatttgggggcgcttacggcggtagaccagatacgaacacaggatgatggtccacacgaacataaacagaatggccgatacggtggtgaccagcgtaaacactgttatgacgttcgggatcaggtaaatcagcaccacgcctgccagtagacagatgcaggagaacatcagcccgttggacggcactgcgcgggaagacagtttcccgaaggcttttggtgccatcccttcctgccccaggccgaacagcatccggctggtggagaagatgccgctgttggcggaagacgccgccgaggtcagtaccacaaagttgatgatacttgccgcagcgggcaggcctgccagtacaaacagttcaacgaacgggctcttgtcggcggcaactgcgttccacggcgtgacgcacatgatggcaatcagcgcgaagacgtagaacatgatgatacgcagcggaatagcgttaatcgcgcgcggcagggatttcttcggatctttggtttccgccgccgtagtaccgactagctcgatgccgacaaaggcaaagatggcaatctggaagcccgcaaagaaaccgctgatgcctttcgggaagagtccgccgttgtcccacagattgctaaacgccgcgacggagccggtgggtgttttgtagtgcattagcaccatgaccaagccagcgataatcaacccgacaatggcgacgattttgatcatcgcaaaccagaactcggtttcaccgaacattttgaccgtggcgaggttcaggccgaagaggatcagcacgaaaatcagtgaggcgacccactgcgacagccctgggaaccagaattgggcataggatgtgacggcaaccacgtcggcgataccggtcaccacccagcagaaccagtaggtccagccagtgaaatatccggcccacggacccagcaggtcggcggcaaaatcgctgaaagatttatattcgagattggacagcagcagctcgcccatcgcacgcatcacgaagaacagcatgaagccgatgatcatataaacgaaaataatcgacggacccgccagactgatggtttttcccgaacccataaacaggcccgttccgatggcaccaccgatggcgatcagctggatatggcggttggtgagatttctgcgcaggtgctccggagtctcgtccccagattgactgatgacttctgtatcgtgttgcataggttatttcttcctgtcatgtatggaataagggctctatctggctcttttctcagcttttatagcgggatctgctgcttgaggatgaaggacagtcaggcagatctgccataataatgttaaattccggctcattatagctatggcgttgcagaatctaatagcgaatgtactgttatttttacactctttgagcaactgctcgtttcgtcctcttcctgaagtcgttttgtccgttatgcgagggtgaatgtcgtttaacgaggcgcagcaatcggcacattacgccatacttgtttcaggtagcggaatttggtccgcacgcaagaatggagaaaaactatgttagccgacccgtcgaagaagtatgttgctttcccaacggtaaacttaccggaccgtcagtggccgagtaagacccttgataaggtgccgcagtggtgctcaagcgatttacgagacggtaaccagtcgctagcggagccaatggataatcagcgtaagcgtatgttcttcgacatgctgctgcgctgtggcttcaaacagattgaagtggcgtttccttctgcctctcagaccgattttgacttcgttcgtggcttgattaacgacaaggccatccccgaagacgtttggattcaggtattgacccagtcccggagcgacctgattgagcgcacgtttgaagcgcttatcgacgcaccgcgcgctatcgtgcacttgtataacgcgacgtcgccgatatttcgcgaggtggtgttcaacatggataaagccgccacgctggatttggccgtgcgcggtgccaaacagattcgtcagctgtgcgaaaaatacccgcaaacccaatggaccttcgaatactcgccggaaactttctgcttcaccgaactggagttttctctggaagtctgtgaagcggtggctgccgtgtgggagccctgcgccgagcgcccgatgatcctcaatctgccggccaccgttgaggtcagcagcccgaacgtttacgccgaccagattgaatggttctgccgtcacttcagccgtcgcgatcgggtttccatcagcgttcatccgcacaacgaccgcggaactggcgttgccagcgccgagcttgcactgatggccggtgccgaccgcgttgaaggctgcctgttcggcaacggtgagcgcaccggtaacgtggatctggtgaccatggcgttgaacttctatacccagggtatttcgccgggtctggacttcagcgacctgaagggcattgtcgaaatcgttgagcagtgcaaccagctgccggtccatccgcgacacccttacgccggtgagctggtatttaccgctttctctggttcgcatcaggacgccatcaagaaaggttttgccgcgcagaagcagcgtgaaagcaatatctggaatgtgccttatctgccgctggaccctgccgacgtgggctgtagctatgaggcggttatccgcgttaacagccagtccggcaagagcggtgcggcgtggctgctcgagcagaatcatgggctgaaactgccgcgtggattgcagattgaattcagtaaagcggtgcagaaagagactgacaccagcggtaaagagatgagcaccagcgacgtatggcgtctgttccgccagcgctatggtctggtggaccagccggtgatgaagctgctgagctacgatattcgcagcgacgagaacaatctgcgtcatttcagcgccaaggtgaatcatcagggcaaagagattacgctgagcggcagcggtaacggcctgctctcatcggcggtagatgctctgcatcgctccttcgacctgatgctggaaattggtgattatgatgagcacacgctgggtcatcagagccacagccgtgcggttgcctatgtcagctgccagcgtccgcagggagaaagagtttacggcgtgggcatcgacagcgacgtttccagcgcctcgctgcaggctctgtttaacgccagcgcacagctgctgcgttaactaacccacggtttctgcggcacgggccgcaggattgaagtactcgctcggcggcacgcccagcgttctgcgaaacatggcgctgaaggcgctgggactgtcataacccagctccagcgccacatccagcaccgattgccccagcgccagcgcattcatcgccgaaagaatctttgccctgcgaacccagtcactaaaccttaaccccgtctcccgctgaaaacgtcgcgaaagcgttctgccgctgatcgccagacggttggctatttcttcaagctcccacgccgccgacaaatcatcacggatctgctggcaaagcgtcagcagttgcgggtcggtaggttccgggaggtgaaggggaagaatcggtaacagccgcagttcatcaagaatcaattcgatgatgcgctcgtcgcgtccgccgggcgcatagtcgaccggcacgctgaaggaggcgaggatcagttctcgcagcaggggagaaatctgcaccacctggcactgtgcaggcagatccgcacgggcgagagagtcaacaaacagcgtccgcgcctgaacagcaccgataaagcgcagactgtgggtgacgttggcggggagccagacaccgcgcccgggcgggaccatccacacgccgtgatgagtcgatacctgtactaccccggtaactgcatgaataagctgtgaacagccgtgacggtgggagggttcgcaatcgccgtgttggtaatcgactgccacagcggcaagcgattggttttcagctaaaaaattctcatgcatggtgaagctaacttccgaaaaatgacggtaatgaaattaacaccctcaggcgtgaggattctttttggctttttcagcagcctgtttcgcttcttcggcaagctgatggagctcttcctcggtcaactgctcggcgacctcatgcagcttcgccagcccgtcgcttacgtgaacatcgtctgctttggttttgctttcgctatctttgtcgctcattttcttttactccagattgtttactcgagagagccaatccttttaaaggccacggtgattcattttagcagattttaccctgtcgcgaggtaggccaggagggcgctgagttgggccactgtgtaaaaaaagagagccgcgcgggctctctttcgaaaaggcatcgtctggttatgtcagacttattggcgatagcctgttttgatctgctgtagcgtggcgttgaagatttgagcctgctggggatcttcgatctgggagatgaatttttccagattaagcacgactttgccggcatcagcctggccgatggccttgagcatgagtgtcagggtcgctttcagacaggcaacttcggttgccagtgtttcaacgttggcctgggtagtaaaatcacatgcgctcataatatctccttaaaaaccagtggcctcaccgggccgctggatgacgtgttcaatagctttaccgtctctgcgtgcagaggcggctaaaaatggtggcgccatactagcacagtcctaagtcaggctgggagcaggctgtagcggaagtcccgctcgagccgattaatttttttataatctttgtaaaaaaataatcatcttcgtcaaggatactaaacttaagcaggtgttgagaatagttcaggtacaaccggcgcttttttcatattaaaaaccgttaactgaactagcagaagaaaataatccgcgttgaaatcagcaatatatcccttggttaggctgctgttattttgttcgttaataaataatcgttgatctaagtcatatttatcgtagataggcactcgatattaggggttgtaaaacacgctattgtatgattttaaagtcttttgttgtgtgcttgcgctgtaatcgattcctgaatggaatttaagttttacatttttaaacgataagattttgcaatgaatgcttggttaatttccctcggatgcagtaaaatatgccggttaatttaattagcttaaatttatttttttatttccgcagtcatgtttttgctttcaggttttacctggtacgcgttcgacctgacgctgtagactctttttttgcttatgtattgttctgtgccttttgcagtttttgcagattgtttacatgaaaactcgatgccgctgagcaaacgaatgaaaaatacgaccgtgtgacgccctttatttttggagaattctctttgattagcgttcttcttgtagatgaccacgaactggtgcgcgcagggattcgacgcattcttgaggatatcaaaggcatcaaagttgttgatgagatgcagtgtggtgaagatgccgtaaaatggtgtcgcagtaaccatgtcgatattgtcttgatggatatgagcatgccgggtattggcggccttgaagccacgaagaagattgtgcgcttttgccccgatatcaagataatcatgctgactatttatactgaaaaccctttacctgccaaagtgatgcaggcaggtgcttcgggttatctcagtaaaggggccgcaccacaggaagtggtcaacgcgattcgcctggtcgattctggccagcgctatattgcctccgatattgctcagcaaatggcgctaagccagcttgagccacagtcagaaacgccgtttgatacgctgtccgaacgtgagcttcagataatgatgatgatcaccaaagggcaaaaggtgaacgaaatttccgagcagctcaatcttagccccaagacagtcaacagttatcgttatagaatgtttagtaaactaaatatcaacggtgatgtagaattgacccatctggcaatccgccacggtcttttcaactcggagacgttatctggtagtgagtaatgagcgttttgacccacaggccttcttaaaaacggtcaccagccaacccggcgtctacagaatgtacgacgcatccgggacggtgatttacgtcggtaaagccaaagatctcaaaaaacggctttccagttattttcgtgtccaggtctcgagtcgcaagacggagactctggtcaagaatatcgatcaaatcgatgtcacggtcacgcataccgaaaccgaagcgctgctgcttgaacataactatatcaagctgtatcagccgcggtacaacgtgctgctgcgcgacgacaaatcgtacccgctgatctttttaagtgccgataatcatccccgactgactattcaccgtggcgcaaaacatgccaagggcgagtatttcggtcctttccccaattcctatgcggttcgagaaacgctggcgctgctgcaaaagctgttccctatccgccaatgcgaaaacagcgtttatcgcaaccgttcgcgtccctgcctgcaataccagattggccgctgtctcgggccttgcgtgagcggcctggtgagtgaagaggaatataagcagcaggttgactatgtgcgactgtttctcgaagggaaggaccagcaggtggtaacgcagctgattgagcgaatggaagcggcaagtaaagaccttcgttttgaagacgcagggcgctatcgcgaccagatccaggccgtgcgccgcgtgaccgagcgccagttcgtgagcggtaacagtgaagatcttgacgttatcggcgtggccttcgaatccggcatggcctgtttgcacgtactgtttattcgccagggcaaagtgttgggcagccgcagctattatcctaaagtgccgggcggcaccgagatgtccgaggtggtacaaaccttcgtaggacagttctacttgcagggaagccaggcgcgtacgttgccgggcgagatactgctcgacttcagcctgcctgaaaaagacctgctggccgaatcgctgagcgagatggcggggcgtaaggtttatattcagagcaagccacgtggggatcgcgctcgctacctgaaacttgcccgcactaacgccaccacggcgctgacgacgcgtctgtctgaacgctcgaccattcaccagcgattggcagaattagccaagacgctcaatctctccgagattaatcgaatggagtgttttgacatcagtcacaccatgggggagcaaacggtcgcttcctgtgtggtatttgatgccaacggtccggtgcgcgctgaatatcgccgctataatatcactgggatcaccccgggcgatgactatgcggcgatgactcaggtacttaatcggcgttatggcaagtctatagaagaggcaaaaattcctgacgtcatctttatcgacggcgggaaagggcagctcggtatggcgatagacgtgttcaaggagctcgatgttacctgggacaaatcaaaaccgctgctgattggtattgccaaaggcgcagatcgtaaagccggactggaaactttgttcttcaaggcggaaggagaggggattgcgttgccttcggactcgcctgcacttcacgtgatacagcatattcgcgacgattcgcacaatcatgccattaccggtcaccgtcagaagcgtgccaaggtcagaaataccagcgcacttgaagagatagagggcgtcggtccgaaacgtcgccaggttctactgaagtatatgggaggcattcagccgttgttgaatgccagcgcagaggaaattgcaaaagtgccgggtatttcacacgcattggcagaaaaaatccataatgcgttgaaacactagggtcattgtagcaacatactcataatatctacatcggacagatagttacctacgcacatgcaatttaatataccgacgtgccttaccctgtttcgcgttgccatgatcccgttcttcgtattggctttttatctgccttacgtctgggctccggcagcctgtgccctgattttcgttctcgccgccatcaccgactggtttgacgggtatcttgcccgccgctggaagcaaaccacacgtttcggcgcttttctcgacccggtcgctgacaaggtactggttgcgattgcgctggttctggtggccgaatatttccacgcttggtggataaccttgcctgcggcgactatgattgctcgcgaaattatcatttctgcgctgagagagtggatggccgagattggtaaacgcagcagcgtggccgtttcatggattggtaaagtgaaaaccatggcgcagatgctttcgctggtggcgctgctgtggcgtccaaacgatatcgccgtgggcgttggcgtggttgccttatacatcgcggcagtgctgactttctggtcgatgttccagtatttgttcgccgcacgtaatgatttgctggaaccttgatcgaagtgatttaaaaaacggcaatcaatcacgatgagtcgataattttattgactcaccgcgtcaggtaagtagaatgcaacgcatcggaaggcagcaagcaattagccagaagataagttaaaaaaatcagtaagttctgattaaagcgggaatagctcagttggtagagcacgaccttgccaaggtcggggtcgcgagttcgagtctcgtttcccgctccaaattcgattatatagaacaatgttctgtgtaacagcaagataagtaaagaattaaggcgcgttaacaaagcggttatgtagcggattgcaaatccgcctagtccggttcgactccggaacgcgcctccaattttcccggagcccgggtggtggaatcggtagacacaagggatttaaaatccctcggcgttcgcgctgtacgagttcaagtctcgtcccgggtaccatggaaaattactgaataatcaaaagcaataaagtagtaatgtcgttatgccaccttcgggtggtttttttgtttttggggtttcataatatcctttcataatattattggtctcctactactgggactatcttcatcttccggtcgtaaatcgccgtttgggatgaatttttatgtcctgaaatttcctgcttgtcacgcagcgtaccggttaaatctgatattcccttcgctttcaaatcatggaaggtgaaatcaaactctatttctggaaacttctctctggcttcttccctcgctgcagcccaacgactgttaaaacccatcccgtgtgtaccttgaacctgatggctgatgcaaaatgaagaagctactcatgccttttttaaggggcaaatgaagacattactaacattggggtgtactaatcaacggggagcaggtcaaagttcaagtctcgtcccgggcaccatggaaacagcgagtaagccgcacagcgtgcggcacggttcttaacgctaaaagatgcgcttaacgcttaaaggtacgtgatttcactctgtgttctttgaatgcagagaaaccgaagtaaacgccaatcaccgcaagtaccaaagcggccgcgagaagaactacattgctggacatgaattacctatgattcttatttgtgggggacgcgaatggtaatacattaaccactgccttagtagggacaatgtgctgtcagtgtttgctgcatgtaataaagattttcaccttattaatcaaagtgaaaactcatcaaaacctccactttttggctttgtctctgcggcagattcgctttgcgttttttactcggtgagtcaacctggaagcagtgaatgtggtgcctggtggcaagaagagcgcagtgcagaaacgtttatccgtagagggccaaaagaacacaaggtacggagaaggccaaccagaaagcgcagagggacaggacaaagtaggggccccagtggcgtaaaagatgacgttttatactcattgaagatctcatatagcggaatgggaatttccgccgatgatacctttatgacaaaagtcatgtatgtttgattgtgacagttaatgactctctacgcttcgcaataacccgtcgagagccttgtcattagggcttctaacgctttgtaactgctataaagaggagggttatctgcacttcctcggtttttaacgtcttcccctcgtttttatacagaaactttgcggcgactggcgtcatttgaagcaagtatctctcttttttctaagcctatttattcttgcctcaggctctgcattcgcatgaagaacgcactcctggcccagcaggcctcggtagatttcataagaattcctgtaacgagctttttttcaatttgaaacgctatttacagaagttattaagcatacggagcttaccatccgacggacacgtacttttcaagcgatgagcctctgaacaactgatgctgtactttgccgtcaacaaaccattcacagcgatacttctcatcatcctgatcgtaactgtcgacagtcatttttggaccaccagatttaagcagtaccacgtcacctgcttcgaatttctctgccatctgtcactccttacaacaaggtgaaaattactttgaatatggtttattttccagatatctcaagtcttaaggcgaagatgacaggcggcacgacgcgtttgttttttgataaatcggcgattttatgagctttacaggcgatcctaaacccaacttccagaactttcggctaaatagtcgacataaaaaaaagagtgaaaactttgccgctttcactctttatttcaggtaaaactaactttctctagatttcgtactggacgccgcgtaccacgccgattatctcgcagttaccgttgatgggaatattggcatagcgaggattgaggggcaccagatatttgttgggaccatcgatcaccaactttttcatcgttgcttcactggttcccgcaatacgagcgacaacaattttcccgtttgttgcctcgacgtggggatcgacaatgacggtcgagccttccggaatactcggaagtccggaagggttagtcattgaatcaccccgcaccgttagagcaaatgcgtctgaagagactcttaacccggtttccatccagtaatctgcgctctcaaatagttcagttgattctgattcagtgaacacgcctgcctgtacccaggaaaggatagggatttttctcacactggtcaccagcggctgtagtccagcaaaatcagtaccataaagtatataagcttctgaggtattaaagtattttgcaagctttaacagagattctgccttagggacgttgagatccttctcccaatatcccaccgttacatctgaaacgccgcagtattcacccaaggctttttgcgtggtcttggttatcctgcgtagcctcttaagtcgtgctccaactgattccataatccactctcaattaaattaactaagttatcttagttttatttgatcaaatttaaccttgaatatattatctaacttaacttagcttgtgaagcctgatggctaacaaagcttaggagagcgatgcacaatctcatcggactgcgcagcggcagagcagaaaagcgacctttggaggacatcttatgagagatataccacaagttttagagcgctggggcggctgggcagctgcaaacaacagtcaacttgactggcagaaaacggccgccggtttcagaagcctgctccccgatacctataagtcacgactttcatgctgcgatgatgatggtctgctgattgacggctgcgtaacccgactaaaaaaccttaaaccagaggaataccagattctgattcttcattatgtgatgaatcagcctaagcgagcgatcgctcgtgcaatgaagagggatgagaaactggtacgcattatgctgcaaatggcagaaggatttgtggagggctgcctggctacgctcgatacccggctggacatggacccgatggttgaaatttataaagaaccaaaaaaagtgctcacgcggtccgcaaaaagccgtttattctattaaaagtggttactgagtcacgtagccctatcccataaaacctcgcttcggcggggtttttacgttctaaagggccacttcggtggcccttttttattggattcaattttaccctccacgaggacaggcaaaatgattaagtgcttccttgtctggctgaaaggtctttattacacctcgaataatcccgcagaaacatacataactcaggagaatatgatgacgacattaacacttgtagccgtactggataatcagcttgccgatgcggtcgctgcagacagcgtacaggccacggtcgtcgacgacaccggtgctgccgtctcgggcgtaagtgtcacttttagcgcagataacggtgcaaaagtcaccgcagtgtcaacgtctaccgatgagaagggccaaattaccgcaagcgttatcagtttgaccgcgggtagcgccaccgtgaccgctacactaacggatggaacggctgctgctgttgtcgtcaatttcagcgcgacgacatctttggttgcaactactgcatctcccgttgttaccgaggtgatggctgcctcttcaaactcagcctctgatgccacgacaacatctgctgtcgaagccgctgtgacctccaccgatacaacgactgcgagcaagactaatacggatacgacgaccttgtcaccgcttgcggagctcaaaaccaagagcgaagcgttctttgcctttgtcgaacagggcattaaggtccttgggaaggatgcagaagcagagttggtggcgttgaaagaaaaatacctgtagagccactatggagcccatattctgggctcgcttaatattaaaaaattaaaaaaactcacgcggtccgaaaatcatcctctactctgttaaaagtggttgctgagttcggtaactgtaaaaaattttaaaacctcgccctggcggggttttgtctttttggcgggtcatactttcagaagggtcactgaggtggcccttttttattggcctttctatcaacccctttctattgattcctttctacagaccatgaagggccttcgagcgcctggtgtaacacaacgtagcctagggtgctttaacgctattccccgagaccatagagcacaaccaacgacagttggaggtggagacgatgaaaatgaacccacaaagtgacggattctggacgcatttctgggcgacgatcaccgcactctttagtgcggcgggtctgactaccgagcaatggatttatgtgttttgtgccatttttggcgcattgctttctttcaattcctacctcaacaacaaacgtgccttgaaagaaaggcagaacgaagatgaaaaaagaacggagatcctacgctcctatctcgctggcaggaaaaataatgccgaagtcgtgccggcaaacgttgctgaagaggtaaaagatgtcatgaacaaggtaggtacctgatggtgatgtcacctgttttaaaaagcaaattagtgaagttgagcggggcaaccgcgctaacgattgtgatcgctttactcggtgggccagaaggcattgaagggcagaaaagtacgccgtaccgcgatgttggtggcgtatggacggtgtgcagtggcatcacagggccagacgtcattcccgggaagtactactcggacaaagagtgtgaggaactgttggtcaaacatttggctccggtcaagaaagcggtcgatgcggcggtaaaagtgcctgttgataactatacccgagccgccctttattctttcgcctacaacgtgggcatcagcgcattccagcactcttcgttgctaagaaacctcaatgccggtgatacgcagcaggcctgcgacggcctgcgaaaatgggtttatgtcaataaacagcgtaatcgtggcctgataaaccgccgtgaaattgaccggcaagtctgtctaatggggcaaacatgatcaacaaaatcgccgtgataactaccctgctgattctggcctgcatcggcctgttgatggctatcgcctttcatttttacggtaagacggtttcacaggagaaagcactctcttctcttaccgaacagaaaaatgaggctgagtttatcactcagtcacaggccttaagcgtgggcatattcaatgagatttcaggagcgacgctgaatgaacaaaaaaataatcaggccgctagccagcaacgccagaccgttattaaaacgctgcttgaaacggcaccttgtgctgtggtgtctgtgcctgctgccgctaatgacagcctgctcagccactacaacgcagtacgtcaagacacccgtgacgccaataccggccaatctgctggcgcagtgcgacccctcacctccacccgataaccctcttacctatggctcctccgttctatggaatgagctgttactgaccgacctgcaaaactgtaatacccagctcgatggcatccgccaaatagaacaggccaggcagaaatagcctgcgctactgcgtgaattttacgcaaacaaacacgactccacccaacccaaaaggatatacccatgacgactattaccctgatttgcccaagcaatggcgctgcggctgacggtagctctcaagatgtattggcaatgacctgtgttgattcaagtggcaaagcggtgtccgggcaagttattactcttactgcaacgacaggagtcaccctgagcgcgacctcggtgacaactgactccaccggtgtggcttctgcttacgcaacaagcactaccaaaggcacatttaccgtaaccgcagcgtcaagcggagcgacctctgtaccctgtgccgttatctttaccgacggttatgagactgcggcagcaaaccgcgtgttaagtaccatgcaaaccgcattggcagggaccggtggcgctaactatgttggctggaacagcagcgtcagctatagcgcaggcacgctgggcgcagcgttcaattcaggtaccacacagctaagctcgctcacttcaaaacaggcgcgttggattgatatcgaagattacgctgataccaattccgcagccggtgactggaccactgcgattcaggcagcgattgacgcgaccaacacccttggaatctataacgtgcgaggcacgggttcttatgccgtgagcagcacggtaaaaattcgtaatgtgccgtcttcaggcctgaatatcgcgatttacaaaatcacgaccctgagtgcatttccaagcaataccactttctgggatgcgacaccggtaatttcaattggtgatactaccggcaacatcgttggattgaacctgttcatcaactatctggatggtggcagcaaggcagacggtattactggtgtttcttacggttacggtacctctcacgttcatatcggctatgcgacaaactgtattgcggtcatgcgtatgggcagcatgactacaccagtgcgactaactggataaccggtgataactgggtaggcaactggatgggcgtctatctggccaacggtaccagcggaaccagtccgattgttgaagcctggatcatcgacgtcaaatttatcgccaataaccgctggggcggcatgtggtactttgatgccggtcagtacggtcagattcgcggcgactgggattataacgggacctacctcgctgttctcggtctgagcaccaccactgggctgtcttccattgccggccagacggggctgaaactcaccgatggcacgacccagatggagttcctgttctactatacctatcagggtacgacctacattgttgtggcggcttccagcaatatctccaaagccagcggcacgggtgcggtaccctggactgcaggctcaactatcagctgtaccacagtaaccggcgtatcactggtatttagcacctcggaaatcgcaggggataacgctagcggcagtaactacttcgacattctgcatgacttcgaacgtgcaccttttggtcgaattcaggttgttgcaggttacatctccggcatcattggcggcaacttgtatacctcaagtttccagtatcaaaactcgttctcaggcaccaccgacagtttccggggcttcggcatttccaactcgggtacggcactgtcgttttacaactatgcgctggctagcacgcctatagcgaacttcacgtccagctacgtgaacttcccttcgaagttgtctacagcgtatcgtctgattgaagggggcgcttttgccagtcagattgccgcctcgtccagcacaacatcggcgctattaaccttagtggatcagagcaccgacaaatattacgccgaggggactatgtatgatattaccctcaaaaccaactacgcgggcacctgtggttcataccgagtattcgttatttcctcaggcggatcgtactctcacgttgttgtttcgacctacagtggggacgcgattgctgttaccttcacggatacaacgtctggcgtgcagatgaacttccgtcaggaagcgcaaacgtcgatggctgtggccgtcaacgccatcaggatttaaggttatttgcctcagaaaattaacctatccacgggcagcagccctcgctgcccgttattctctgctaatggtgtatttgtaagcaatttgttacaaacttaatatttgcagaacgcagcactattatctcgatcggtataaaatgctgttttagaaaattgtgaactgttgataaaaatatgaaatggttaacaaaaagtgcgcttttgtttgcggtaaaaacctgcatagcggcttttttagcgttatatattgcacttaagctgaatctcgataagcccgcatgggccatggtctcggtttacgttatctctcaactctattcggcctccacgctgtcgaaagcgctgtttcgctttttaggcaccgtactgggcgggatattcatttttatcatttatcctctcaccgtacagcacccctgcttttcagcctcagtgtgtcgctgtgggtcgctgtctgtctgtttctttctcttcacgatcgcacgccgaaaagctatgtgtttatgctggccgggtacagcgccgcaatcatgggctttgccgatgtgactacgccgctgagcattacctatacggtgatttcgcgggtagaagagattaccgtcgccattatctgtagtagcctaatccacatgctggtgtttccggtgcgaatgcgcaatctgttggaaagcaccgtcaacaactggtacaacagcgccaaaagcctctgtaatgagctgctgaccgcagaatccaaagacagcaccccggagcgtgaccagattctggtgcagatggctaactatccgctcaacgttgaaaccttgataactcacctggtttacgaaggggattcggccagaaagctcattcggctggtggggcacagtatcaacatctctcttatcttatcccgaccctgaccgcgattgaaaagcgcctgagcctgctggcagagcaggggataagcttccccgattttgtcgccgagtcgtttagccattttcttcagtggctcaacagcccggaggaaagcggcaatgcgcagtggattcaggacgacatcggcgcgtcgcaggaaaggataaaaacgctttatgccagcggtaatatcagcgcagaggaaagtctgctgctcattggcctgatggaacgtttgttgaatttcattcgtctttccgaatcctatctgggtgctaaagagcgtgtgaacttgatgggcagcagcgaaaacgcaataaagacaagttaatcagaaggcatgctgaccgcgggatgatcctgctttcctgctttaccgccttctttgcgaccatggtcggctgcctgttctggattggcaccggctggaaagacggatcaacggcgccgatgatggggcggtcgtatgctcattctttgcctcactcgacagtcctattggctcgatgaaagtctttctgaagggcgtactggtggctatcgcggtcagtatcatatatgtcgggatttttattcccggtaccgttaccttcgaatcgctgataatcgttctggcaccgggcctgattgctttggggctggtcatcgccaatccgtcgaccaactttatcgggctgattattgcgacccagatccccggttttatcggtatgacgcacaatctcaaacctgatttactgtcgattatcaatgccgctatttccaccgtcgtgggcattgtgatagccgtagtcattacagccgttttgcgtaataaaaggcctgcgtggactgcccgtcgcgtgctgcgcagaggcgtcaaagagctgctgcagtttacctccgagatcaagatgaacgcgtcgtcgttgctgtcgcgtcagcagtatgtcgccagcatgatagacaagataaacatcattctgccgcgaaataaggtcgatcctatcccaggtgtggcgttgggcggcaatctgatcactgaaatctggctcggcgtaaactgctacgacttttatgcgcgtcatcaccagttgctcaaagacaatactctcgacagcgatgcgctgatggctgagattaccggctattttaaaaagcggttgaggaatatctacatcgcgccgccgcagtcgctgcttgatgaactggataaactgctgctgcgcaccgaaacactttgccgctcagacatgcagctcttcgcgccgctgttttatctgtttaacattcgcatggcgctctatccggcgctgcgttggccaggcgaagaaaatactctgccgttaactcaataacctcataatctataagataattatttaaaagcctctgataaaggggctttttttatggccctgggatgaaacccgacttagcgctaaactcttcgcgtatttttctcaaatttatgtttcctcgcacctgttgtcagggtagtctcatgggccgtcgcaaaatatcggacgtaacgtaaatcatcctcgaccaatactcgtaataaaaaataagtgtaaacaggacaagtatggactccaccctcatttcgattacccctggtaaggagacgtcttcactcaaccgtgcccgtcgtgctgcctggggtagcttcgcaggcgccgttgtagactggtatgactttctgctctatggcatcaccgccgccctggtgtttaaccgtgaatttttcccgcagataagcccggctatgggaaccattgccgcgttggcgacctttggcgtcggttttctgttccgaccgttaggtgggataattttcggccattttggcgaccgtcttggccgcaaacgcatgctgatgatgaccgtgtggatgatggggctggccactgcactgattggtctgttgccgagctttagcgtgatgggttggtgggcgccggtgttattagtgacgctgcgcgcaatacaaggctttgccgtgggggcgaatggggaggcgcagccgtgctttcagtcgaaagcgcgcccgagaagaaaaaggctttctatagcagtggagttcagattggctatggcgtcgggcttcttctctcgaccggattggtctcgcttatcagccatttcaccagcgatgaacagtttctgagctggggctggcgtattccgttcctgttcagcacgttattggtggtggcggcgctgtgggtacgtaatggcatcgttgagtccgccgaatttgaacagcagagtcagcataaaccggccgtacaggctaaacggcgtttgccggttgtggaggcattgatacgccaccccagcgcatttttaaaaattatcgccctgcgcctgagtgaactgctgacaatgtatatcgtcaccaccttcgcgctgagctactctacccagaatttgggtttgccccgcgacctgttcctgaatataggtttgttagttggcggcctgagctgcctgaccatcccatgctttgcctggctggctgaccgctttggccgtcggtgcatttatattaccggcgcgctaatcggtgcttttagcgccttcccattctttatggcgctggaagcacactcaattttctggatcatcttcttcgcgattatgctggccaatgttgcccatgacatggtggtttgcgtacagcagccgatgtttactgaaatgtttggtgcgagctaccgctacagcggtgcaggcgtcggttatcaggtcgccagcgtagtgggtggggatttacgccattgattgctgccggattggtcaccttttcgggcggcgactggcacagcgttgctgtctacctgctggcgggctgcctgctctctgccgtcactgccctgatgatgaaaggggcgcgctaaactatagcccgtttgaggtatcttaaacgggctttttgctttgcagtcatacctattttattaacgttagcgccagaaggcctattaacgtcagttaatgctgattttttgttttatttagacataattgtgaatatctttgttacaaacaaaagaagataacaagtttcgtgggggtataaaataatgctttaaaatctacgtgatttgtttaaatagaaatgaagtggctaacaaaaaatgcttttttgttctcggtaaaaacctgtattgctgcatttttggctttatacatcgcattaaaacttaatcttgataaacccgcctggtcacttacctccgtttttatcatctcacagctttattcagcttcgacgctctcgaaatcggtgttccgcctcatgggaacgctattgggcggagcttttatcttttttatctatccaatcaccgtactttatcccctgctgttcagcgtgagcgtatcgctgtggattgccttctgcctctatctctcgttgcacgaccgcacgccgaaaagctacgtgtttatgctggcaggatacagcgcggcaatcatggggtttgctgacgtcgattcgccgctggaaatcacctataccgtgatttcacgtattgaggagataacggtcgccatcgtctgtagcaccctggttcacatgattattttcccggtgcgaatgagcacgctgctggaaataagcgtcaataactggttcgaaagtgccaaaaaactctgcagcgaaatgctgacacgcgtgtcgaaagaaaagtcgctggagaacgagcacattatgattcagatggcgaactatccgctcaatgtcgaagcgttgatcacccactgtgtctatgaaggagactcggcccgcacgctcattcgcatggtcacggtgcaatatcagcatttgtcctacctgatcccgacgctgaccgcgattgaaaaacggctgatcctgctcagtgaacacggcgtttccttccctgattttatcgcggaaaccttcagccatttcctggtatgggtgaacaatcctgagcagtttggcagcacagacgttttggttgaagaaatggttgcctcgcaggagcgaataaaagcgctctatgcaagcggggagatgaacgccgaggaagggctgctgttaaccgggctggtcgaacgactgcaaaactttatccgtatcgcgcacgcctatctgggggtaaaagagaaagtaaacgcgctgaacgatgaaagaaatccggccaagtttacgctgtttaagaaacacgccgacaaggggctgattttcctgtcatcgctgactatttttattgtgactatgctctgctgcctgttctggataggcacgggatggaagcacggcggaacggcgccggtgatggcggctatcgcctgctctttctttgcggcgcatgatagtccaatagcctcgcttcaggtgtttctaaaagcggtcattattgccatcgccgctagcctgatttatacgctggtgcttattccttgggcgacgagctttgaagcgctggttatctgccttgcgccgggactgctggcgttgggcatggtgattgccaagcccgcgagcaatatctttggcctgatcatcgcgacacaaatcccgagctttatgggcatgagtcatgacttcaggcccgacccgctctccatcatcaactcggcgatttcgacggtggtggggattctgattgcagtgctggtcaccgcgattattcgtaacaagcgaccgtcatggaccgccaagcgcgcattgcgtaagggtatcaaagatctgttgcagtttacgcaggccgtcaagatgaacaaatcttcactgcttggccgtcagcaatacgtggcggggatgctagacaaggtcaatattattttgccgcgcattaaagttgatcctattcccaacgtggcgctgggcggcaatttgattaccgagatctggttgggggtgagcgtattcgacttctacgcccgacacgaagagttgttacgcagtaacggtatcgataccgatgcgctgctgtttgagattaataactatatcaagcaacgtctgaagaacatttatgctgcgccgccgcagtcgctgctgacggaactcaacctgctgctgctcaagcttgagccggtgtgccgcacggatatgcatctgtttatgccactgttttatctctttaatatacgtatgtggctttattcctccgagcgttggccgacgctacccgcctgatccatgcgaaagacgctgctgcgggccttgccgaataaacggcccgcagcgctaaagccctatcagatgttttcgagctcaatgtccttggttttaggacccagcactgaaatcaccaataccactatcgccatgctcgcgacgataaaagccagtacgccaatattgccggtgtattgcaaaaatagaccgataataatgctgctgaacaccgtcgagaggcggctgaaggagtaacagaaaccgacggccgtcactcgaatgcgtgtcgggaaaatctcggtctggtaagagtggaagctgtaggtcatccaggcattgcaatagctaaccatgaatccgcaaagaatcatgcccaacgggctacgctgaaaaccaaacagtgctccaaaaataaccacgcccaatgcgcctgcaaccacctgccattttatttcgaacttgtcggcatacagcgcagaaatcagacatcccagcgggaatccaagggtgataataatcgaatatgacaggctatgggtgaagctgctgccttgcccggtgaggagagcgggaagccagttgccgaagccgaagaagccgatagcctgaaatatattgaaaatcatcagcatgatagtgcgtgaccggaactgaggcgtccaaatttcacggaacctgccgcggcgttcaaactgggcttcatcctgtaacgtaaccagatgggtgacgcgctcgactttgcccattccgcactgtttttcaagattctcaagcacttcctgcgctttgtccgcctgaccctgctgcatcagccaacgcggcgattcaggcagttttttgcgtacaatccagataaacaatgaaaacaccacgctgaccagcaatacgtagcgccagcccgtcaggccaaaccacatgtggggaacgaaccaccatgagatgagtgcgacgacgggaaccgacatgaactggataaagaaagagaatgcgaaggccttactgcgcaggcgtgtcgggaccatctctaccagataggtgtcgatggtgacaagctctatacccagaccgacaccgaccagaaagcgcagaaaaatgatccactcagcctgatgctggaacacaataagcagggtaaaaaagctgtaccacagcagggcaaacataaaggtcaggcgacggccaaacttgtcggccaaagggctgagcaggctggtgcctataaacaggccaaggaaagtcgaggaagcgaacgcggcctgatcggaaataccaaacacgcccgcactgccggtgtgaaaaatgccttcggcaattaaccccgggctgatataagccgtttggaatagatcgtaaagctcaaaaaaaccaccaatggctaataatattataaagcgccacagtcccggtgatgagggcagggcgtctatcctggtgatcagttcagggccgtcatggccgctggctgattcgataaagacgaagcgtgtgcaaattccataattaccattacccgttaaaaaaacctcatcatgctaagtttttatcaccggatttaaattcggaataagatttcaagatgtaaaaaaatagcggaattcactgatatctttaatctgataagattaatcgcttctcgctgctattccaatgcttgcagatatttatccgcattttgcgcaaaacttattcagtaattattaaaataaagtttatagccaaacagcaggtaattctgccaaacactatgccacgccgagtgtcttttcaggcacgatggcgactgattttttcctgatttttacctaatgcaaagctgagtgccgcccagccgcaggccagcgcgacgctaaataacgtcagtgggccgagcgccaagcccagaagactgattgcctgataggaccatgcgcccatttggtcgccggcgcgatacaccagcgtgtcgataaatactttggcgtgatatttctcctctttgctgaccacggtgaagaggatttcgcggctcggtctggaaagcgcgaagtttattgcccgacgtagaatagtgaaccccactaaaacggcgagagagggcgcccatcctagccaagcgaagccaataatactgaccagcggcaacagcattagcgtatagggcgtgccgaagcgagagatgattctgccgctggcggtcagttggcagataagtgtgagcacattgatggtcaggtcaacgctggcgaaaaacgccgtacgctggctctcatcgctaaatgcctgcctgacgatgctggcctgctgaaagtaaagcagcgtcgaggtgatggagtaaaacaggatatatccgcaaattcccagcagatagggggagcgcattgtctggcttatccccgtgaacagcgggccaatgcgcctttcccttgcagagtgtcccgcactttctcgccttgcgatgggggctttttcagtcgctggccgccgcggcgagcagcccaaagagccgtttgccgcgtcgggtatcaaagacatcaacgattaatgcccagaatactgagacggcaaacaggttgaaaaccgagacccatataaaaaagagtcgccctacccagggattgttcagtccacccggtagtgtaaacagtgcggcaaacagcagcagtatggcggcgcagaactgatagctatagctgatgaaacgctcgcgcggcaggcattgcgtcaatttgttgtaaggccattgcaacaacagcatagtgactaacacggcgctaaacagccacggcagtgaatgagcgccggtcagggtacttatcgtgtcgcgaatgggtctgatcatgtaataggcacccagcagcgagaaaatatacagccagccccacagcagcggggcgatttcctcacggcgaatgcgtaccactttgctcatcctgcggtgcagtgaaatcatggcaggttgggtcatttcaggcgttctttttcgatggattcaggctcatgaatggccattagccagttcggcacgcagatctttttcgctcagggcctgcaggaatagcgaggatcctggctggaaaagtctggcgctgtcgagattaccggtcacgacaggcacgaaccctgcctgggttatgagtgctgatacggcgtcaacggcagcctggctgtctccggcaagcgggacggcaatcgatggcgattgatgggcatctgaagcaagggtgctggccgcaatcgagttgaaggctctgactacctgagctcccggcaggaactgcgcagtggcacgtccactgcctatcttcagcgctgtctcggctgtttggccgtcacggccgggataagggttgccgacatcgagcacgattttatttttcaatgcgcctccgagggttttcccaaggcctggcagggcgccgtagggcaccgccatcactaccacgtcaccaaactgtgtggcctgttgcactgttccaacctgcgtatcgtgccccaaagaggccgccagcggcttgagttcatccggatggcgtgaggcaaacattacctgataaccggcattgacccacagcttgccaagcgtcgagcccatttgacccgcgccaataataccgattttatgcaccggcgttgcggctgccagggcggtgggggcagcgataatggcgaacgccgccaataagggcacggcaaaagcgaggcgtcctagtcggtgaaacttgtctgatattccccttaaaaacatgattttatccttaatcttccgtcgcgacagtgaatggtatcgattccatttgtgctttttaatatctggctatgggctaggtttgctgccaaagctgtttgaaccctccttgggaacccgttaccgggtcggtcacgggtatcgcgacctgtgaaatattgcgccgtgcctctggcaatttgtgtatatcgtcgtgatacagatcaggactcagtccctgtggatacgcgccaagcacctcaaagtctgcacttgccgagagctgcttatggcccacgcctgcggggatcagaataacatcgcctttttgcagcgtcgccgtagggccggtctcgccgcccagctgcacggttgcattgccgctgctgacgcccagcagttcatgggtattggaatgatagtgggtgaaagtgaatatctggtaacgccactgtactggccaaccgttacgggaaaaaagatcggtgaggtatgcatccgtattgttagtccctttcgggacagcctgctggtaaatcagcaggggagacggtcgttaggtacgccgttcaccgttttatttagcagcagtgaacggatattgatgttcggccgtctgtcttgtgcataccccgtcagtggtagggcagaagccactaacagaagctgacagaagtctctgcgagagaattgtcggggacttattatcttcatggcgcgctcctgtgctttggttaaatcattgccgaggaaggctttttgaacgcaggcagcccggaccgaaggccataggatgtcgcgaactcaccgttaaaatatgtgagtcagatcgcaattttgtcaaggcaatgggggaaatgaaaatgtggaagagtgtgacaaaggaggataaaacagccccgaagggcagttatagggttagaaatcacccgctggttccggattatcaatagccttgagagaaaggggcaaatgataatttggctgacttgagaagaaggcctgcagggcaacgcgcttgcttcggtcaatggaaatctcttgcactgtcttacggaaaatactgtaacgaccacagctggtgcaggtgacgttgagcactttttcggtcagattaagtgaagtcttggtcttgattgtactttggcataatggacactcgtcaggagtgtgaacagcggtggaactcataaaacctccggttttatttgggccagcgagcagtatagcgcaaaaagcggtcaagcccttagcgctaattgagtaaaaggctaccaattttgatttaagcccaattttatacgtactcgatcacctttaagccttcctgttcatgaggcggtacgaagtaactcgagataagaaagtattgttgttcagtggtttgaaaggcgtgtgagcctgattcattgcgcagttttaggcgctggaggcaaacatcatctggaacattgggaaagtggagttggtgttctctgtcggcattttcggcaatacttttcccccaggcgcgcaatgttggggtattaagcgggaaatcgagcaccacgttcacgcctttgccgagtaagttttcaatgtgcgattgcaggacttgacgcagacgagcggagttttcgatgtactgttcgagggtattttgccgccctgcgaacagcgtcgatagccagtcatcttcagaaatcagcagcgcattatggcgttctgccagttggtgcgccagcgtagatttccctgaccctatctttccgcacaataaataaagccgtgccgggttgatgactttttccatgattttgccttcctctaccgtggttgattgtcccgccggtgagttttctccccacccgtcgggtggattgaatgcgacaaatgtgcagccgttatcccaccccgataatcaaggtgataataattcgtgccacaggtcggttttcatttttcatagtaatattgataacgtgctaaggaatgtttgtcaaaattcttcgtaaaacatcgtttacttttaacgttataaaatgagtgcagtaaaagactgagcaaaatggggtcgaggctgccgtaaaaatggggcaaaaatgtctgattttgcgcaatacaagcaaattgatgggtcaaaatatcggcgtatatttgtggtgggtgacgtccatggctgcctgcaacaattgaatcgcgccctgtcggcccagcatttccagaaacatcaggacttactggtttccgttggcgacttaatcgatcgcggcgagcatagcattagctgcctgtcattgattgaacaaccctggtttgcctctgtgcgtggcaatcatgaacaaatggcgatagatgcccttaaggggctcaacgtgccacgctggttgaagaacggcggcgactggttttacaagctcgattcagccaaagagtcgatcgctcgtgaactgattgcgctggccgacacattgccccatatcattgaaattcaaagcaacaatggcctgatggtgattgcccacgctgattatccgttaaatcgctatgagtatggtcagccggtagatgccaacgaggtcgtgtggagtcgccagcgaattgccgattctaacgccggtcacgtgaagccaattaccggtgcggaaagctttttctttggccatacgccggtggagaatctacagcaatttgccaatcagtattatattgatactggcgtggtatttggaggcaggctgaccctcctgcaaattcaatgatattattggtttaacacggaacggtatcactgatttcaggttctgattttttgtctccccgagagttgataatggaaaataagcgagaagaccggctacaaaggttgctggtggcgttaaaaaaaactgacaaaatccaccttaaagatgccgccctcctgcttgatgtctcggagatgaccgtgcggcgagacttgggtgacagcgtgtcgccactcatattgctcgggggatacattgttatcgatcctaaaaacagtccggcgacacactacttcgtcagcgaacaaaaaatgcggcaggtggcagagaaacagcggttggggaaacaggcggcaatgcttatcaatgatgatgacgtggtgtttttcgactgcgggacaaccacgccatatatcattgagcagatccctgatgaacgggtgtttagcgcaatttgctattcgtttaacacgtttttagcgctgcaggataagcctaactgtgaggtcatgatgtgtggcggcatgtatcggcccagcaacagcatcttcattcccttcggtaagagcagcagcgaactggataacaccttaccggacaaggcctttatttctgcggcgggtatcagcatcgaatatggcgtcagctgttttaatttcgatgagctcttggtaaagcatcaggcgatgcagcgctcgcgtgaaaaaatactggtggtcgacagcagtaagttcggtcaggtgcgtcctgcggctatcgcgccgttgagcaaattcaacacgctggtaaccgacagcgcgccgcagcagtcctatatcgattattgccgcgagtcagatatccaactttactattagcaatttaacccagtttatagatactctttgggcggctgcaatacgagacgcccgaattactcacccctctgccgcttagcgtattacggcaatcttctcgactgactgatagagcactacttcaaacatgcccgtctttgtaccgtcgttgaggtattgctcgtagcaggctttaccgtcgggacgatagccgctgttggcgatatgaacgttgaaaaagtcggtccacgcctgagcaaagttgtcgtcatcaatggtggtatgaaacgccgcgtaagtccctgcgggtagggtttgaagcgcaatgccctgactctcgttatcgagctgaaaaccttctttgacgctgaccgaaggatcggcgcgacaggcctcgggcgcggtgatgttcggattgtcccaaaataccgtcaaccattctccttccatgagctcatgctgttttgcccacggggtcaacgcgtcgaatccctttttgatgctggtttcataggggccggtaacgcggtaactggcaacgaattttgcaggtttttccagaatcataaatgccacggtgcattcctcatcttcagtgagttaagtgataactgcgtattctccttgattccgaacgctttccgttggtcaggaagtgtcggatgtataacagatggcgagaaattttcgatgaactgctctacttgctataacagttgccatgttaaaatcttgctatcaaattgcagtatagtcctgactgtagtgaggttatcaatggatgtcgttaaaagtattctgaatagtgagatcgaacgcattaaccgtgccgaaggtcgagatggcaagccgagaatcaacagtgagttcttcatcaatcacccatggctgtgtctggcgatgtttgtcggctacattgccgttggtattgtgatgtacgcgtcgccctatatgggactcggctggtttgccggttttaccgcgtttttaatctttatggcggctatgctgctgctggaaatcaagcccacctatcgctacgaagacattggggtattggatttgcgcgtctgttacaacggcgaatggttctttagccgcgaaatctcttccgatgcggttaacacgctgctcaacagcagtgcagtcgatggtcgttttaaatcacacgttcaatccatcgtgcagcacaaaggcgcaattgatttttatgatgtgtatgacctggcacgccgatatcaaacatcgccagatttcacgcataccgcacaaatcgctttgtaaaagtgcaacaacatttgttcccgctatgactcttcactggcggctctgataaactgatggtgatatcatgcgcaaagaaatgataaattgactttgctgcctcagtacaggagccgccgtggaacgtatcaaactctcaattcatcacttacataaatatgttgcgggcgaaaagcaggatgctcaggcaacggcacgaatttatgccggtgataagctcattctggtagaaaatatgcagggccaagccgtctggtatgaccgatttattcatgccactgatgataacggtcagccgctgcgcgtggagtgggactgtgacggtgaggccagcatggacgtctcccgcgttgaagtgtgttcatgctgtggtggcgatgagagtctgcacgtttaagcgctaacgtgaatacgttgtttcaggagcgagaaatgaaatttctgaataatgaatttgaataccgaaactggatcatgcatgaaatcttccaggtcaccgcagtgggtgagtcctcggaatttgctgaccaggagattgaggattttatctttgatgcgcgtcctgtcgcctatccctgtattgccgtaatgatccagacgccgggtcagccgggcgtgtgcgagccgcgctttgtttacaaagagcaggttttcgagtgggcgcatcagatgggatttggtttcgacagctgagccctggaatcgctccagggcacacgtcctgattagacgtttttacgatctatcttttcttcgccccagaacaagtaatcctctttggttttggcgaaagcgaccggtagcacttcatcgttgccttcttcccagattttctgggccagaacttcatcgttatctgccagttcgaaaatagcttcagcaatctcgtgagaggtttcacgcacgttggcccaagctttaatgtttgaacttgtcatgtgtttctccttagttttggcaccccttaactatgagcgctagagtggggagacgcaaattcaaatgctggaagcttgcacagacgggcggggcacagcacagattaatggtatctgcggtccgctgtcgtttatactctttcaacgctgactgcctgctttatcgtagggcgagccagtgaaattatcaaaacacgcagtgcgcgacgacaaggtgaaaaacatgagtgacgatatttttgatttcgatatagatgctgcgttggaaactgccgaagagaaagcggctgaaaaagcgtctgccttaccggaaattctggaagatgaagcagactgcgaaggctgcaaaatctaagtcagcacccgtttgcaccgactgaatattgttaaaaggaaccgcttcggcggtttttttgtttctgaaacgcagaactgccacatcgcaagcatttttttatgcgcagctttcaaccatgattcgaacagcaaatcgacgcctttttcgcctggcagaaaaatttatgttttccgccatggccttacgaatccgcaacaattgtaagcgatttgacgcaactgtgaggaaatcgtgaggcgtgagtaaatgggataaattcctatagaacagcaagatagccagggttaacttagcagcatcagatcggacagatcctggagttagacatgaaaaaaatattattagtgctcgcggcgttgtcagccctttcaggcatacccgccgtagcacatgcaaatgtttcgattgggattaacacccctggtttatcgcttaacatcggtgaccgcgatccacgcggttactactgggacgggggcggttggcgtccgccgggctggtgggatcatcaccgctatgaccgtggccattgggtttattatgaggcgccgccaccgccaccgcgctattactggcgtgaaggtccgccacgctggcacgagggtccacctccaggccgctggcatgaaggtccaccgccgggtcactggcatgatggtccaccccctggtcgttggtaatcggtcagtagcgacccaagcgtggtaacgaagtaaagtccgattgattaacgagtaaaagattttgagtacagggttggcgctggctatgcgaaagcatccccaacgtcaattctgtactttttagtttctgcatcctttcacttaatttccgcgaacctcgactaaaactgggcagtgcgcattggcaaccacttctgcgctgaccgatccctttaagatcctgccgaacgccgtaagctggcgatggcccatcacgataaccgacgcctttttgctttttgcctcagagaccagcgtttctcccgccgagccaacgaccagattaccgcgcgccgtaataccgacttccg
